(19) United States
(12) Patent Application Publication
(10) Pub. No.: US 2024/0271133 A1
(43) Pub. Date: Aug. 15, 2024

(54) KRAB-Containing Zinc Finger Protein And Cancer

(71) Applicant: ECOLE POLYTECHNIQUE FEDERALE DE LAUSANNE (EPFL), Lausanne (CH)

(72) Inventors: Didier TRONO, Vufflens-Chateau (CH); Filipe MARTINS, Chene-Bougeries (CH); Priscilla TURELLI, Echandens-Denges (CH)

(21) Appl. No.: 18/289,973

(22) PCT Filed: May 12, 2022
(86) PCT No.: PCT/EP2022/062972

§ 371 Date: Nov. 8, 2023

(30) Foreign Application Priority Data
May 12, 2021 (WO) PCT/EP2021/062606

(51) Int. Cl. C12N 15/113; C12Q 1/6869; C12Q 1/6886

(52) U.S. Cl. CPC C12N 15/113; C12Q 1/6869; C12Q 1/6886; C12N 2310/14; C12N 2310/531; C12Q 2600/158

(57) ABSTRACT

The present invention provides methods for detecting cancer as well as agents and compositions for treating cancer by modulating the expression and/or activity of one or more i) KRAB-containing zinc finger protein (KZFP), ii) mRNA encoding a KZFP, and/or iii) KZFP gene.

### FIELD OF THE INVENTION

[0001] The present invention provides methods for detecting cancer as well as agents and compositions for treating cancer by modulating the expression and/or activity of one or more i) KRAB-containing zinc finger protein (KZFP), ii) mRNA encoding a KZFP, and/or iii) KZFP gene.

### SEQUENCE LISTING

[0002] The instant application contains a Sequence Listing, named PAT7576PC01_ST25, which has been submitted electronically in ASCII format and is hereby incorporated by reference in its entirety.

### BACKGROUND OF THE INVENTION

[0003] DLBCL (diffuse large B cell lymphoma) is the most frequently diagnosed aggressive non-Hodgkin lymphoma (NHL)¹. It comprises several histological variants which can be grouped into three main molecular subtypes based on gene expression signatures, namely germinal center (GCB), activated B-cell (ABC) and unclassified (UNCL) DLBCL². The distinction between these three groups carries prognostic and therapeutic value. Indeed, ABC DLBCL has a worse prognosis than its GCB or UNCL counterparts as it is often refractory to first line standard treatments and prone to relapse. The standard of care for first-line therapy in DLBCL is the R-CHOP (rituximab, cyclophosphamide, doxorubicin, vincristine and prednisone) regimen.

[0004] Research on drug resistance has so far mainly focused on genetic alterations, but recent data points to the role of epigenetic changes. For instance, anthracycline-resistance has been linked to silencing of the transcription factor SMAD1 by DNA methylation of its promoter, resulting in impaired activation of DNA damage response genes³. Accordingly, inhibitors of DNA methylation, such as 5-azacytidine, are currently coupled with R-CHOP in some clinical trials⁴.

[0005] Although advances in therapy over the last 20 years have led to improvements in cancer survival, additional strategies are still urgently needed.

### SUMMARY OF THE INVENTION

[0006] The present invention provides agent modulating the expression and/or activity of one or more i) KRAB-containing zinc finger protein (KZFP), ii) mRNA encoding a KZFP, and/or iii) KZFP gene, for use in the treatment and/or prevention of cancer and/or cancer metastasis in a subject in need thereof, wherein said one or more KZFP is selected from the group comprising those listed in Table 1, or a combination of one or more thereof.

[0007] The present invention further provides a plasmid or a vector comprising one or more nucleic acid(s) encoding the siRNA, miRNA, piRNA, hnRNA, snRNA, sg RNA, CRISPR-based loss-of-function system, esiRNA, shRNA, and antisense oligonucleotide, or combination of one or more thereof, of the invention.

[0008] The present invention provides a host cell comprising, or modified by the introduction of,
[0009] i) a plasmid or vector of the invention, or
[0010] ii) one or more nucleic acid(s) encoding the siRNA, miRNA, piRNA, hnRNA, snRNA, sg RNA, CRISPR-based loss-of-function system, esiRNA, shRNA, and antisense oligonucleotide, or combination of one or more thereof, of the invention.

[0011] The present invention provides a pharmaceutical composition comprising
[0012] i) a therapeutically effective amount of an agent modulating the expression and/or activity of one or more i) KZFP, ii) mRNA encoding a KZFP and/or iii) KZFP gene, of anyone of the invention, or
[0013] ii) a plasmid or a vector of the invention, or
[0014] iii) a host cell of the invention,
[0015] and a pharmaceutically acceptable carrier or diluent.

[0016] The present invention provides method of diagnosing cancer and/or cancer metastasis in a subject comprising:
[0017] (a) detecting, directly or indirectly, and measuring the level of transcription and/or expression and/or activity of one or more KZFP in a sample obtained from said subject;
[0018] (b) comparing the level of transcription and/or expression and/or activity of said one or more KZFP to a control biological sample for the same one or more KZFP;
[0019] wherein a differential transcription and/or expression and/or activity of one or more one or more KZFP in said biological sample, relative to the level of corresponding said one or more KZFP in a control biological sample of a cancer-free subject, is indicative of the subject having cancer and/or cancer metastasis.

[0020] The present invention provides a method of determining the progression or regression of a cancer in a subject suffering therefrom and under cancer treatment, said method comprising:
[0021] (a) detecting, directly or indirectly, and measuring the level of transcription and/or expression and/or activity of one or more KZFP in a sample obtained from said subject;
[0022] (b) periodically comparing the level of transcription and/or expression and/or activity of said one or more KZFP,
[0023] wherein an alteration in the level of transcription and/or expression and/or activity of one or more KZFP in a sample obtained from the same subject, relative to the level of transcription and/or expression and/or activity of one or more KZFP, determined previously, is indicative of the progression or regression of said cancer.

[0024] The present invention provides a method of treatment of cancer, and/or cancer metastasis comprising administering an agent modulating the expression and/or activity of one or more i) KRAB-containing zinc finger protein (KZFP), ii) mRNA encoding a KZFP, and/or iii) KZFP gene, of the invention to a subject in need thereof.

[0025] The present invention provides a kit comprising
[0026] (a) one or more agents of the invention, plasmid or vector of the invention, host cell of the invention and/or a pharmaceutical composition of of the invention, and
[0027] (b) instructions for use.

[0028] The present invention provides a method of stratifying a cancer in a subject comprising:
[0029] (a) detecting, directly or indirectly, and measuring the level of transcription and/or expression and/or activity of one or more KZFP in a sample obtained from said subject;
[0030] (b) comparing the level of transcription and/or expression and/or activity of said one or more KZFP to a control biological sample for the same one or more KZFP;
[0031] wherein an alteration in the transcription and/or expression and/or activity level of one or more one or more KZFP in said biological sample, relative to the level of corresponding said one or more KZFP in a control biological sample of a cancer-free subject, is indicative of the disease stage or grade.

[0032] The present invention provides a method for classifying a cancer subject, the method comprising
[0033] (a) detecting, directly or indirectly, and measuring the level of transcription and/or expression and/or activity of one or more KZFP in a biological sample obtained from said subject, wherein said one or more KZFP is selected from the group listed in Table 1 or a variant or fragment thereof, and
[0034] (b) classifying the cancer subject as having a poor prognosis based on the presence and/or alteration of the transcription and/or expression and/or activity level(s) of the one or more KZFP in the biological sample.

[0035] The present invention provides one or more oligonucleotide probes or primers specific to one or more target sequences within an mRNA encoding a KZFP, or a combination of KZFP, selected from any of SEQ ID Nos of Table 1.

### DESCRIPTION OF THE FIGURES

[0036] FIG. 1. (a) Results of a transcriptome-wide association study (TWAS) using univariate Cox regression analysis to correlate the expression of genes/pseudogenes with an average expression>1 counts per million (CPM) with survival, in a cohort 630 DLBCL patients whose lymphoma samples were sequenced at the Duke University (North Carolina, Reddy et al. Cell. 2017)⁵. Out of 23′560 included genes, 1530 were significantly associated with survival (p adj<0.05, light grey dots). Amongst the latter, 41 were KRAB-ZnF genes (darker dots) with a skewing of these towards an increased risk of death. (b) KRAB-ZFP genes carry a significantly higher proportion of adverse prognosis-associated genes compared to other TFs and protein coding genes.

[0037] FIG. 2. (a) 38 out of the 39 KRAB-ZnF genes associated with poor prognosis were upregulated in ABC DLBCL aggressive disease subtype. Although upregulated in ABC DLBCL, these KRAB ZnF genes conserved their significancy after including cell of origin as a covariate in our Cox regression analysis, suggesting that they are not solely a surrogate feature of the intrinsic aggressivity of the ABC subtype. (b) 32 (82%) of these KRAB-ZnF genes were located on chromosome 19, suggesting a non-random distribution, as only 56% of the members of KRAB-ZnF gene family are present on this chromosome. Most highly expressed poor prognosis KRAB-ZnF genes were enriched in the subtelomeric region of the long arm of chromosome 19 (Chr19q), a region reported as recurrently amplified in ABC disease subtype (Lenz et al., 2008)⁶ and associated to an increased risk of relapse (Dubois et al., 2019)⁷. A 200 kb region defining a hub of closely distributed poor prognosis-associated KRAB ZnF genes embedding the most highly expressed ones (ZNF586, ZNF587, ZNF587B) together with the respective paralogs (ZNF417, ZNF814) of the latter were selected for further in vitro studies.

[0038] FIG. 3. (a) The downregulation of ZNF586 in U2932 ABC and OCI-Ly7 GCB cell lines using two different shRNAs has a clear negative effect on cell growth. (b) The tandem downregulation of the ZNF587 and ZNF417 paralog pair also decreases lymphoma cell proliferation. The importance of this negative effect doesn't seem to be related to the origin of lymphoma cells, suggesting that its targeting may also be active in GCB DLBCL. (c) After 2 days of puromycin selection in the case of OCI-Ly7 (total of 4 days of knock down) and 3 days in the case of U2932 (total of 5 days of knock down) transduced cells were seeded for another 5-6 days of proliferation assessment. These assays showed a durable and profound arrest of cell proliferation.

[0039] FIG. 4. Apoptotic studies on the U2932 cell line revealed that, in parallel to cell proliferation arrest, knocked down cells demonstrated an increase in cell death in comparison to control cells (FIGS. 4A & B). Annexin V/propidium iodide (PI) staining assessed by flux cytometry revealed that this the burden of this cell death, which apparently of the necrotic form, started to surge after 4 days of gene silencing (FIG. 4 C).

[0040] FIG. 5. (a) Gene set expression analysis (GSEA) of the genes upregulated in arrested cells surviving to ZNF587/ZNF417 conjugated knock down compared to control cells revealed enrichments in pathways implicated in proteolysis, endoplasmic reticulum-associated protein degradation (ERAD), antigen processing, Major histocompatibility complex (MCH) class I presentation and cytokine production, suggestive of an increased immunogenicity of these cells. (b) Volcano and bar-/plots showing a significant upregulation of MHC class I A, B, C, E, F, G subunits, together with their common beta2-microglobulin (B2M) subunit in knocked down U2932 lymphoma cells compared to controls. In addition, CD80, a surface transmembrane protein activator of cytotoxic CD8 T cells is also upregulated in this context. (c) In human DLBCL samples (n=633), MHC class I components expression tend to be negatively correlated to ZNF587/417 gene expression, suggesting that ZNF587 and ZNF417 may contribute to immune escape of lymphoma cells.

[0041] FIG. 6. (a) The transcriptome of U2932 (and OCI-Ly7, data not shown) KD cells revealed features of partial cell differentiation, such as an upregulation of immunoglobulin heavy chains and of the master regulator of plasma cell differentiation PRDM1 (BLIMP-1), suggesting that ZNF587/417 may contribute to differentiation blockade of lymphoma cells. Looking at curated tumor suppressor gene lists (Zhao M et al. NAR, 2016)⁸, we found that the Cyclin Dependent Kinase Inhibitor 1A (CDKN1A, also known as p21) was upregulated in both lymphoma cell lines, thus possibly contributing to proliferation arrest of lymphoma cells by inhibiting the progression of lymphoma cells through the G1 to S phases of the cell cycle. (b) Western blotting of phosphorylated gH2AX showing its increase upon Z9NF587/417 conjugated KD. This suggests that their silencing generates replicative stress, thus contributing to cell cycle arrest and cell death phenotypes.

[0042] FIG. 7. (a) The negative effect of ZNF586 KD is not restricted to lymphoma cell lines. When tested on HL60 and HEK293T cell lines, these were also impacted. However, the HT29 colon cancer cell line was spared from this effect. (b) In the same way, the negative effect of ZNF587/417 conjugated KD impacted also HL60 and HEK293T cells, but in this case, the negative effect was present in all 3 colon cancer cell lines tested (i.e. Lovo, HT29 and HCT116) cell lines. Interestingly, the K562 CML cell line was not impacted by the silencing of none of these KRAB-ZnF genes, suggesting that this cell line possesses intrinsic resistance mechanisms that will deserve further exploration.

[0043] FIG. 8. In order to identify oncogenic KRAB-ZnF gene candidates, we conducted a differential gene expression analysis comparing the expression of KRAB-ZnF genes in tumors and corresponding healthy tissues from 10 TCGA tumor types. We identified 72 KRAB-ZnF genes as overexpressed in at least one of the ten studied tumor types and never downregulated, thus enriching for recurrently dysregulated KRAB-ZnF genes displaying presumable oncogenic functions. We also sought to identify KRAB-ZnF genes associated with survival by conducting a transcriptome-wide Cox univariate regression analysis, as previously described, across TCGA tumor types and Duke University dataset. We identified 52 KRAB-ZnF genes associated to poor prognosis in at least 2 tumor types. 5 KRAB-ZnF genes were associated to poor prognosis in the DLBCL dataset only. 10 KRAB-ZnF genes overlapped these features and constituted the most promising oncogenic genes candidates of our screen.

[0044] FIG. 9 In order to assess if ZNF587/417 depletion triggered a DNA damage response in different cellular contexts, we assessed gH2AX phosphorylation by flow cytometry in U2932, HBL-1 and SUDHL-4 cells. We also sought to assess if this DNA damage response was cell cycle dependent using DAPI staining. A significant increase in the number of gHA2X positive cells was seen in all of the tested cell lines. Interestingly, the cell cycle independent accumulation of gH2AX positive cells seemed to mimic exogenously induced DNA damage. a) Barplots showing the increase of gHAX positive cells upon 7.NF587/417 knock down. These FACS assessments were done 4 days after the lentiviral transduction (LV) of an shRNA targeting ZNF587 and ZNF417 simultaneously. b) Representative scatter plots of flow cytometry analyses for each assessed cell line.

[0045] FIG. 10. RNA-seq analysis of U2932 cells conducted 3 days after ZNF587/417 downregulation revealed a transcriptional signature suggestive of a UV irradiation-like DNA damage response in line with above-mentioned cell cycle-independent gH2AX accumulation. (a) Scatter plot showing the differentially expressed genes 3 days after ZNF587/417 KD. The genes belonging to the UV response UP Hallmark gene set are specified in boxes. (b) Gene set enrichment analysis (GSEA) showing UV response UP genes as the most enriched Hallmark in U2932 cells 3 days after ZNF587/417 KD.

[0046] FIG. 11. U2932 cells 3 days after ZNF587/417 KD presented a significant increase in cells with centrosome amplification suggesting the occurrence of chromosomal instability (CIN), aneuploidy and chromosomal missegregation events. a) Alpha-tubulin (spindle assembly) and DAPI (DNA content) stained U2932 cells assessed by immunofluorescence. b) Quantification of U2932 KD cells exhibiting multipolar spindles compared to controls.

[0047] FIG. 12. The DNA induced by ZNF587/417 downregulation triggers cell-type dependent cell cycle arrest. The distribution of cell cycle (CC) was performed with propidium iodide (PI) staining. DNA damage induced by ZNF587/417 downregulation triggers cell cycle arrest at different stages of the CC with U2932 cells presenting G2/M accumulation while HBL-1 and SUDHL-4 cells accumulate in S and G1 phase, respectively. This suggests that the induced DNA damage is unlikely the result of a defect in the cell cycle-dependent DNA repair machinery.

[0048] FIG. 13. U2932 KD cells present an increased susceptibility toward dendritic cell (DC) phagocyric killing. Co-culture assays were performed with human monocyte-derived dendritic cells (DCs) stained with DeepRed CellTracker® and U2932 KD cells stained with Green CMFDA. Flow cytometry analysis showed an increase of lymphoma cells being phagocytosed by DCs (double positive cell population). These co-culture assays lasted 4 hours and were conducted with KD and shScramble-transduced U2932 cells 3 days after LV transduction.

[0049] FIG. 14. ZNF587/417 KD cells present an increased immunogenicity through an upregulation of MHC class I exposure at the cell surface, suggesting that the antigenicity of these cells is presumably enhanced and that they are more proned to be engaged by cytotoxic CD8 T cells. Flow cytometry studies showing the upregulation of MHC class I on the surface of ZNF587/417-depleted cells 10 days after LV.

[0050] FIG. 15. In order to assess if this MHC class I upregulation was associated with an effective antigen processing and possible neo-antigens presentation, we decided to study the immunopeptidome of ZNF587/417-depleted cells using by immuno-affinity purification of MHC class I peptides followed by liquid chromatography-mass spectrometry (LC-MS/MS). This study showed the enrichment of MHC I bound peptides derived from proteins involved in immunes processes (dark) but also an overall increase of both MHC class I and II complexes in ZNF587/417-depleted cells compared to shScramble-transduced controls, suggesting an increase in repertoire of antigens exposed to the adaptive immune system and a reprogramming of the immunopeptidome.

[0051] FIG. 16. In order to assess the possible toxicity of ZNF587/417 downregulation in healthy human cells, we transduced primary human fibroblasts. Cell proliferation assay performed with MTT showed the absence of deleterious effects on the proliferation of human primary fibroblasts, suggesting that the genotoxic effect of the KD is seemingly restricted to transformed cells with intrinsic higher levels of CIN. The absence of CDKN1A (p21) upregulation at the mRNA levels suggests the absence of DNA damage response.

[0052] FIG. 17. Based on the transcriptomic changes seen in ZNF587/427 KD cells, we searched for potential drugs able to exhibit lethal synergistic effect on the latter. Drug sensitivity assays performed with MTT on U2932 KD cells showed cytotoxic synergism between ZNF587/417 depletion and targeted therapies such as ibrutinib (a Bruton tyrosine kinase inhibitor) and dasatinib (a PI3K/AKT inhibitor) but also the hypomethylating agent decitabine, indicating that blockade of specific compensatory oncogenic pathways and genome-wide DNA demethylation are potential therapeutic adjuncts of ZNF587/417 depletion.

### DESCRIPTION OF THE INVENTION

[0053] Although methods and materials similar or equivalent to those described herein can be used in the practice or testing of the present invention, suitable methods and materials are described below. All publications, patent applications, patents, and other references mentioned herein are incorporated by reference in their entirety. The publications and applications discussed herein are provided solely for their disclosure prior to the filing date of the present application. Nothing herein is to be construed as an admission that the present invention is not entitled to antedate such publication by virtue of prior invention. In addition, the materials, methods, and examples are illustrative only and are not intended to be limiting.

[0054] In the case of conflict, the present specification, including definitions, will control. Unless defined otherwise, all technical and scientific terms used herein have the same meaning as is commonly understood by one of skill in art to which the subject matter herein belongs. As used herein, the following definitions are supplied in order to facilitate the understanding of the present invention.

[0055] The term “comprise/comprising” is generally used in the sense of include/including, that is to say permitting the presence of one or more features or components. The terms “comprise(s)” and “comprising” also encompass the more restricted ones “consist(s)”, “consisting” as well as “consist/consisting essentially of”, respectively.

[0056] As used in the specification and claims, the singular form “a”, “an” and “the” include plural references unless the context clearly dictates otherwise.

[0057] As used herein, “⁸ least one” means “one or more”, “two or more”, “three or more”, etc.

[0058] As used herein the terms “subject”/“subject in need thereof”, or “patient”/“patient in need thereof” are well-recognized in the art, and, are used interchangeably herein to refer to a mammal, including dog, cat, rat, mouse, monkey, cow, horse, goat, sheep, pig, camel, and, most preferably, a human. In some cases, the subject is a subject in need of treatment or a subject with a disease or disorder. However, in other aspects, the subject can be a normal subject. The term does not denote a particular age or sex. Thus, adult and newborn subjects, whether male or female, are intended to be covered. Preferably, the subject is a human, most preferably a human suffering from cancer and/or cancer metastasis or a human that might be at risk of suffering from cancer and/or cancer metastasis.

[0059] The terms “nucleic acid”, “polynucleotide,” and “oligonucleotide” are used interchangeably and refer to any kind of deoxyribonucleotide (e.g. DNA, cDNA, . . . ) or ribonucleotide (e.g. RNA, mRNA, . . . ) polymer or a combination of deoxyribonucleotide and ribonucleotide (e.g. DNA/RNA) polymer, in linear or circular conformation, and in either single- or double-stranded form. These terms are not to be construed as limiting with respect to the length of a polymer and can encompass known analogues of natural nucleotides, as well as nucleotides that are modified in the base, sugar and/or phosphate moieties (e.g. phosphorothioate backbones). In general, an analogue of a particular nucleotide has the same base-pairing specificity, i.e., an analogue of A will base-pair with T.

[0060] The term “vector”, as used herein, refers to a viral vector or to a nucleic acid (DNA or RNA) molecule such as a plasmid or other vehicle, which contains one or more heterologous nucleic acid sequence(s) of the invention and, preferably, is designed for transfer between different host cells. The terms “expression vector”, “gene delivery vector” and “gene therapy vector” refer to any vector that is effective to incorporate and express one or more nucleic acid(s) of the invention, in a cell, preferably under the regulation of a promoter. A cloning or expression vector may comprise additional elements, for example, regulatory and/or post-transcriptional regulatory elements in addition to a promoter.

[0061] The term “about,” particularly in reference to a given quantity, number or percentage, is meant to encompass deviations of plus or minus ten percent (+10). For example, about 5% encompasses any value between 4.5% to 5.5%, such as 4.5, 4.6, 4.7, 4.8, 4.9, 5, 4.1, 5.2, 5.3, 5.4, or 5.5.

[0062] According to the present invention, the cancer is a solid or a non-solid cancer. The cancer will be selected from the non-limiting group comprising carcinoma, sarcoma, melanoma, lymphoma, and leukemia. Preferably, the cancer is selected from the group comprising Acute Lymphoblastic Leukemia (ALL), Acute Myeloid Leukemia (AML), Adrenocortical Carcinoma, Adult, Childhood Adrenocortical Carcinoma, AIDS-Related Cancers, Kaposi Sarcoma (Soft Tissue Sarcoma), AIDS-Related Lymphoma (Lymphoma), Primary CNS Lymphoma (Lymphoma), Anal Cancer, Astrocytomas, Childhood (Brain Cancer), Atypical Teratoid/Rhabdoid Tumor, Childhood, Central Nervous System (Brain Cancer), Basal Cell Carcinoma of the Skin, Bile Duct Cancer, Bladder Cancer, Bone Cancer (includes Ewing Sarcoma and Osteosarcoma and Malignant Fibrous Histiocytoma), Brain Tumors, Breast Cancer, Childhood Breast Cancer, Childhood Bronchial Tumors, Burkitt Lymphoma, Carcinoid Tumor (Gastrointestinal), Childhood Carcinoid Tumors, Carcinoma of Unknown Primary, Cardiac (Heart) Tumors, Central Nervous System, Childhood Atypical Teratoid/Rhabdoid Tumor, Childhood Embryonal Tumors, Childhood Germ Cell Tumor, Primary CNS Lymphoma, Cervical Cancer, Childhood Cervical Cancer, Cholangiocarcinoma, Chordoma, Childhood, Chronic Lymphocytic Leukemia (CLL), Chronic Myelogenous Leukemia (CML), Chronic Myeloproliferative Neoplasms, Colorectal Cancer, Childhood Colorectal Cancer, Childhood Craniopharyngioma, Cutaneous T-Cell Lymphoma, Ductal Carcinoma In Situ (DCIS), Embryonal Tumors, Endometrial Cancer (Uterine Cancer), Childhood Ependymoma, Esophageal Cancer, Childhood Esophageal Cancer, Esthesio neuroblastoma, Ewing Sarcoma (Bone Cancer), Childhood Extracranial Germ Cell Tumor, Extragonadal Germ Cell Tumor, Eye Cancer, Childhood Intraocular Melanoma, Intraocular Melanoma, Retinoblastoma, Fallopian Tube Cancer, Fibrous Histiocytoma of Bone (Malignant, and Osteosarcoma), Gallbladder Cancer, Gastric, (Stomach) Cancer, Childhood Gastric (Stomach) Cancer, Gastrointestinal Carcinoid Tumor, Gastrointestinal Stromal Tumors (GIST) (Soft Tissue Sarcoma), Childhood Gastrointestinal Stromal Tumors, Germ Cell Tumors, Childhood Central Nervous System Germ Cell Tumors (Brain Cancer), Childhood Extracranial Germ Cell Tumors, Extragonadal Germ Cell Tumors, Ovarian Germ Cell Tumors, Testicular Cancer, Gestational Trophoblastic Disease, Hairy Cell Leukemia, Head and Neck Cancer, Childhood Head and Neck Cancers, Childhood Heart Tumors, Hepatocellular (Liver) Cancer, Langerhans Cell Histiocytosis, Hodgkin Lymphoma, Hypopharyngeal Cancer (Head and Neck Cancer), Intraocular Melanoma, Childhood Intraocular Melanoma, Islet Cell Tumors, Pancreatic Neuroendocrine Tumors, Kaposi Sarcoma (Soft Tissue Sarcoma), Kidney (Renal Cell) Cancer, Langerhans Cell Histiocytosis, Laryngeal Cancer (Head and Neck Cancer), Childhood Laryngeal Cancer, Papillomatosis, Leukemia, Lip and Oral Cavity Cancer (Head and Neck Cancer), Liver Cancer, Lung Cancer (Non-Small Cell and Small Cell), Childhood Lung Cancer, Lymphoma, Male Breast Cancer, Malignant Fibrous Histiocytoma of Bone and Osteosarcoma, Melanoma, Childhood Melanoma, Intraocular (Eye)Melanoma, Childhood Intraocular Melanoma, Merkel Cell Carcinoma (Skin Cancer), Malignant Mesothelioma, Childhood Mesothelioma, Metastatic Squamous Neck Cancer with Occult Primary (Head and Neck Cancer), Midline Tract Carcinoma Involving NUT Gene, Mouth Cancer (Head and Neck Cancer), Multiple Endocrine Neoplasia Syndromes, Multiple Myeloma/Plasma Cell Neoplasms, Mycosis Fungoides (Lymphoma), Myelodysplasia Syndromes, Myelodysplastic/Myeloproliferative Neoplasms, Myelogenous Leukemia, Chronic (CML), Myeloid Leukemia, Acute (AML), Chronic Myeloproliferative Neoplasms, Nasal Cavity and Paranasal Sinus Cancer (Head and Neck Cancer), Nasopharyngeal Cancer (Head and Neck Cancer), Childhood Nasopharyngeal Cancer, Neuroblastoma, Non-Hodgkin Lymphoma (NHL) such as diffuse large B cell lymphoma, Non-Small Cell Lung Cancer, Oral Cancer, Lip and Oral Cavity Cancer and Oropharyngeal Cancer (Head and Neck Cancer), Childhood Oral Cavity Cancer, Osteosarcoma and Malignant Fibrous Histiocytoma of Bone, Ovarian Cancer, Childhood Ovarian Cancer, Pancreatic Cancer, Childhood Pancreatic Cancer, Pancreatic Neuroendocrine Tumors (Islet Cell Tumors), Papillomatosis, Paraganglioma, Childhood Paraganglioma, Paranasal Sinus and Nasal Cavity Cancer (Head and Neck Cancer), Parathyroid Cancer, Penile Cancer, Pharyngeal Cancer (Head and Neck Cancer), Pheochromocytoma, Childhood Pheochromocytoma, Pituitary Tumor, Plasma Cell Neoplasm/Multiple Myeloma, Pleuropulmonary Blastoma, Pregnancy and Breast Cancer, Primary Central Nervous System (CNS) Lymphoma, Primary Peritoneal Cancer, Prostate Cancer, Rectal Cancer, Recurrent Cancer, Renal Cell (Kidney) Cancer, Retinoblastoma, Childhood Rhabdomyosarcoma (Soft Tissue Sarcoma), Salivary Gland Cancer (Head and Neck Cancer), Childhood Salivary Gland Tumors, Sarcoma, Childhood Rhabdomyosarcoma (Soft Tissue Sarcoma), Childhood Vascular Tumors (Soft Tissue Sarcoma), Ewing Sarcoma (Bone Cancer), Kaposi Sarcoma (Soft Tissue Sarcoma), Osteosarcoma (Bone Cancer), Uterine Sarcoma, Sezary Syndrome (Lymphoma), Skin Cancer, Childhood Skin Cancer, Small Cell Lung Cancer, Small Intestine Cancer, Soft Tissue Sarcoma, Squamous Cell Carcinoma of the Skin, Squamous Neck Cancer with Occult Primary, Metastatic (Head and Neck Cancer), Stomach (Gastric) Cancer, Childhood Stomach (Gastric) Cancer, T-Cell Lymphoma, Cutaneous, Testicular Cancer, Childhood Testicular Cancer, Throat Cancer (Head and Neck Cancer), Nasopharyngeal Cancer, Oropharyngeal Cancer, Hypopharyngeal Cancer, Thymoma and Thymic Carcinoma, Thyroid Cancer, Childhood Thyroid Tumors, Transitional Cell Cancer of the Renal Pelvis and Ureter (Kidney (Renal Cell) Cancer), Carcinoma of Unknown Primary, Childhood Cancer of Unknown Primary, Unusual Cancers of Childhood, Ureter and Renal Pelvis, Transitional Cell Cancer (Kidney (Renal Cell) Cancer, Urethral Cancer, Endometrial Uterine Cancer, Uterine Sarcoma, Vaginal Cancer, Childhood Vaginal Cancer, Vascular Tumors (Soft Tissue Sarcoma), Vulvar Cancer, and Wilms Tumor or a combination of one of more of these cancers

[0063] In some aspects, the cancer is a non-solid/hematological cancer, most preferably, the cancer is aggressive non-Hodgkin lymphoma.

[0064] The terms “KRAB-containing zinc finger proteins”, “KZFP”, “KRAB-ZnF”, and “KRAB-ZFP” are used interchangeably herein to refer to KRAB-containing zinc finger proteins (KZFPs) that constitute a large family of transcription factors notably involved in controlling the expression of transposable element-embedded regulator sequences (TEeRS)^{9,10}. KZFPs and their genomic targets contribute to regulating many biological events, from early embryogenesis to brain development, and from immune responses to liver metabolism^{11, 12}.

[0065] While focusing on the role of these KZFP, the Inventors surprisingly discovered the role of several KZFP, the expression of which, individually or in combination, were associated with cancer and, for some of them with poor cancer outcome. The genes encoding said one or more KZFP are, generally, clustering on one of the following human chromosomes: 1, 7, 8, 16, 17, 19 or 20.

[0066] The present invention thus provides an agent modulating the expression and/or activity of one or more i) KRAB-containing zinc finger protein (KZFP), for use in the treatment and/or prevention of cancer and/or cancer metastasis in a subject in need thereof.

[0067] Preferably, the agent of the invention modulates the activity of the one or more KZFP protein by enhancing and/or favoring the degradation of said one or more KZFP (Sievers et al., 2018).

[0068] In one aspect, said one or more KZFP is selected from the group comprising those listed in Table 1, or a combination of one or more thereof.

TABLE 1

| | | | | | cDNA | Protein |
|---|---|---|---|---|---|---|
| KZFP | Chr. | Start | End | NCBI ref | SEQ ID No. | SEQ ID No. |
| ZNF671 | 19 | 58231118 | 58238992 | NM_024833.3 | 1 | 2 |
| ZNF776 | 19 | 58258182 | 58269516 | NM_173632.4 | 3 | 4 |
| ZNF586 | 19 | 58281043 | 58291984 | NM_017652.4 | 5 | 6 |
| ZNF552 | 19 | 58318449 | 58326281 | NM_024762.3 | 7 | 8 |
| ZNF587B | 19 | 58341666 | 58357606 | NM_001376223.1 | 9 | 10 |
| ZNF587 | 19 | 58361226 | 58376485 | NM_032828.4 | 11 | 12 |
| ZNF814 | 19 | 58380748 | 58400405 | NM_001144989.2 | 13 | 14 |
| ZNF417 | 19 | 58417141 | 58427960 | NM_152475.3 | 15 | 16 |
| PRDM9 | 5 | 23507717 | 23528202 | NM_020227.4 | 43 | 44 |
| RBAK | 7 | 5085490 | 5109118 | NM_021163.4 | 45 | 46 |
| ZFP30 | 19 | 38121906 | 38146366 | NM_001320669.3 | 47 | 48 |
| ZFP69B | 1 | 40916147 | 40929387 | NM_023070.3 | 49 | 50 |
| ZFP82 | 19 | 36879531 | 36909546 | NM_133466.4 | 51 | 52 |
| ZKSCAN2 | 16 | 25247321 | 25269166 | NM_001012981.5 | 53 | 54 |
| ZKSCAN4 | 6 | 28209474 | 28220047 | NM_019110.5 | 55 | 56 |
| ZNF101 | 19 | 19779647 | 19794315 | NM_033204.4 | 57 | 58 |
| ZNF107 | 7 | 64126510 | 64171955 | NM_001282359.2 | 59 | 60 |
| ZNF117 | 7 | 64432153 | 64451414 | NM_015852.4 | 61 | 62 |
| ZNF121 | 19 | 9671004 | 9695180 | NM_001008727.5 | 63 | 64 |
| ZNF124 | 1 | 247318290 | 247335322 | NM_001297568.2 | 65 | 66 |
| ZNF134 | 19 | 58125609 | 58136092 | NM_003435.5 | 67 | 68 |
| ZNF140 | 12 | 133657508 | 133684014 | NM_003440.4 | 69 | 70 |
| ZNF160 | 19 | 53569866 | 53606675 | NM_001322131.2 | 71 | 72 |
| ZNF17 | 19 | 57922528 | 57933302 | NM_001330617.2 | 73 | 74 |
| ZNF18 | 17 | 11880755 | 11900792 | NM_001303281.2 | 75 | 76 |
| ZNF184 | 6 | 27418525 | 27440884 | NM_001318891.2 | 77 | 78 |
| ZNF195 | 11 | 3379156 | 3400376 | NM_001130520.3 | 79 | 80 |
| ZNF200 | 16 | 3272324 | 3285158 | NM_198088.3 | 81 | 82 |
| ZNF202 | 11 | 123594621 | 123612368 | NM_003455.4 | 83 | 84 |
| ZNF205 | 16 | 3162586 | 3170518 | NM_001042428.2 | 85 | 86 |
| ZNF212 | 7 | 148936741 | 148952697 | NM_012256.4 | 87 | 88 |
| ZNF222 | 19 | 44529530 | 44537263 | NM_001129996.2 | 89 | 90 |
| ZNF226 | 19 | 44669252 | 44681838 | NM_001032373.2 | 91 | 92 |
| ZNF239 | 10 | 44051791 | 44070064 | NM_001099282.2 | 93 | 94 |
| ZNF251 | 8 | 145946293 | 145980916 | NM_138367.2 | 95 | 96 |
| ZNF26 | 12 | 133562952 | 133603688 | NM_019591.4 | 97 | 98 |
| ZNF263 | 16 | 3333490 | 3341460 | NM_005741.5 | 99 | 100 |
| ZNF267 | 16 | 31885127 | 31928678 | NM_003414.6 | 101 | 102 |
| ZNF282 | 7 | 148892637 | 148923329 | NM_003575.4 | 103 | 104 |
| ZNF283 | 19 | 44331472 | 44356169 | NM_181845.2 | 105 | 106 |
| ZNF284 | 19 | 44576311 | 44593766 | NM_001037813.4 | 107 | 108 |
| ZNF3 | 7 | 99667595 | 99679346 | NM_032924.5 | 109 | 110 |
| ZNF317 | 19 | 9251072 | 9274089 | NM_020933.5 | 111 | 112 |
| ZNF320 | 19 | 53379432 | 53400888 | NM_001351774.2 | 113 | 114 |
| ZNF324B | 19 | 58962988 | 58969200 | NM_207395.3 | 115 | 116 |
| ZNF337 | 20 | 25653830 | 25677489 | NM_015655.4 | 117 | 118 |
| ZNF343 | 20 | 2462462 | 2489561 | NM_024325.6 | 119 | 120 |
| ZNF354A | 5 | 178138512 | 178157660 | NM_005649.3 | 121 | 122 |
| ZNF419 | 19 | 57999117 | 58007466 | NM_024691.4 | 123 | 124 |
| ZNF420 | 19 | 37569334 | 37621270 | NM_144689.5 | 125 | 126 |
| ZNF432 | 19 | 52534630 | 52552091 | NM_014650.4 | 127 | 128 |
| ZNF473 | 19 | 50529261 | 50552033 | NM_015428.4 | 129 | 130 |
| ZNF479 | 7 | 57185382 | 57200143 | NM_001370129.2 | 131 | 132 |
| ZNF480 | 19 | 52800421 | 52829175 | NM_144684.4 | 133 | 134 |
| ZNF485 | 10 | 44101885 | 44113352 | NM_145312.4 | 135 | 136 |
| ZNF496 | 1 | 247460716 | 247495169 | NM_032752.3 | 137 | 138 |
| ZNF500 | 16 | 4798239 | 4817163 | NM_021646.4 | 139 | 140 |
| ZNF514 | 2 | 95810744 | 95825593 | NM_032788.3 | 141 | 142 |
| ZNF517 | 8 | 146024297 | 146035469 | NM_213605.3 | 143 | 144 |
| ZNF525 | 19 | 53868957 | 53889843 | NM_001348156.2 | 145 | 146 |
| ZNF529 | 19 | 37034514 | 37064194 | NM_020951.5 | 147 | 148 |
| ZNF530 | 19 | 58111252 | 58121466 | NM_001321981.2 | 149 | 150 |
| ZNF543 | 19 | 57831839 | 57842138 | NM_213598.4 | 151 | 152 |
| ZNF544 | 19 | 58740279 | 58775010 | NM_014480.4 | 153 | 154 |
| ZNF547 | 19 | 57874918 | 57890933 | NM_173631.4 | 155 | 156 |
| ZNF550 | 19 | 58053205 | 58071231 | NM_001397372.1 | 157 | 158 |
| ZNF558 | 19 | 8916845 | 8942980 | NM_144693.3 | 159 | 160 |
| ZNF565 | 19 | 36673177 | 36705567 | NM_152477.5 | 161 | 162 |
| ZNF567 | 19 | 37178513 | 37212238 | NM_001322917.1 | 163 | 164 |
| ZNF577 | 19 | 52370300 | 52391204 | NM_001370449.1 | 165 | 166 |
| ZNF583 | 19 | 56915700 | 56938733 | NM_152478.3 | 167 | 168 |
| ZNF584 | 19 | 58920015 | 58929694 | NM_173548.3 | 169 | 170 |
| ZNF600 | 9 | 53267436 | 53290044 | NM_001321866.4 | 171 | 172 |
| ZNF614 | 19 | 52516576 | 52531632 | NM_025040.4 | 173 | 174 |
| ZNF615 | 19 | 52494584 | 52511464 | NM_001199324.2 | 175 | 176 |
| ZNF679 | 7 | 63688851 | 63727309 | NM_153363.3 | 177 | 178 |
| ZNF695 | 1 | 247148624 | 247171359 | NM_020394.5 | 179 | 180 |
| ZNF7 | 8 | 146052944 | 146069157 | NM_003416.4 | 181 | 182 |
| ZNF700 | 19 | 12035921 | 12061578 | NM_144566.3 | 183 | 184 |
| ZNF705B | 8 | 7783858 | 7809935 | NM_001193630.1 | 185 | 186 |
| ZNF707 | 8 | 144766648 | 144777555 | NM_001100598.2 | 187 | 188 |
| ZNF71 | 19 | 57106669 | 57135854 | NM_001370215.1 | 189 | 190 |
| ZNF713 | 7 | 55955148 | 56009918 | NM_182633.3 | 191 | 192 |
| ZNF716 | 7 | 57509882 | 57533265 | NM_001159279.1 | 193 | 194 |
| ZNF724 | 19 | 23404400 | 23433196 | NM_001355404.2 | 195 | 196 |
| ZNF736 | 7 | 63774338 | 63817012 | NM_001170905.3 | 197 | 198 |
| ZNF74 | 22 | 20748440 | 20762745 | NM_003426.4 | 199 | 200 |
| ZNF746 | 7 | 149169884 | 149194900 | NM_001394198.1 | 201 | 202 |
| ZNF749 | 19 | 57946692 | 57958469 | NM_001023561.4 | 203 | 204 |
| ZNF761 | 19 | 53935236 | 53961515 | NM_001289951.2 | 205 | 206 |
| ZNF765 | 19 | 53898401 | 53915262 | NM_001040185.3 | 207 | 208 |
| ZNF766 | 19 | 52772839 | 52799299 | NM_001010851.3 | 209 | 210 |
| ZNF773 | 19 | 58011305 | 58019597 | NM_198542.3 | 211 | 212 |
| ZNF782 | 9 | 99578550 | 99616796 | NM_001001662.3 | 213 | 214 |
| ZNF783 | 7 | 148959286 | 148982079 | NM_001195220.2 | 215 | 216 |
| ZNF785 | 16 | 30591976 | 30597018 | NM_152458.7 | 217 | 218 |
| ZNF789 | 7 | 99070512 | 99085228 | NM_213603.3 | 219 | 220 |
| ZNF80 | 3 | 113953477 | 113956425 | NM_007136.4 | 221 | 222 |
| ZNF805 | 19 | 57751999 | 57774096 | NM_001023563.4 | 223 | 224 |
| ZNF83 | 19 | 53115629 | 53193749 | NM_001277945.2 | 225 | 226 |
| ZNF84 | 12 | 133614094 | 133639885 | NM_001289971.2 | 227 | 228 |
| ZNF841 | 9 | 52567717 | 52599018 | NM_001136499.2 | 229 | 230 |
| ZNF850 | 19 | 37234381 | 37263709 | NM_001193552.2 | 231 | 232 |
| ZNF93 | 19 | 20011754 | 20046384 | NM_031218.4 | 233 | 234 |
| ZSCAN22 | 19 | 58838359 | 58853698 | NM_181846.3 | 235 | 236 |
| ZSCAN29 | 15 | 43650372 | 43663241 | NM_001372080.1 | 237 | 238 |
| ZNF252P | 8 | 146198975 | 146228298 | ENST00000528327 | 239 | N/A |
| ENSG00000269825 | 19 | 53153700 | 53193786 | ENST00000598322 | 240 | 241 |
| ZNF8-ERVK3-1 | 19 | 58790332 | 58826563 | ENST00000591325 | 242 | N/A |

[0069] Table 1 contains a list of 110 KZFP genes with pro-oncogenic characteristics encompassing upregulated and never downregulated KZFPs in at least one of ten broad TCGA cancer categories and KZFPs associated with patient survival in at least two TCGA cancer categories and/or in the Duke's University DLBCL dataset

[0070] In one aspect, the combination of one or more KZFP will comprise a combination of two or more, three or more, four or more, five or more, six or more, seven or more, ten or more, fifteen or more, twenty or more, twenty-five or more, thirty or more, forty or more, fifty or more, sixty or more, seventy or more, eighty or more, ninety or more, one hundred or more, or the complete set of the 110 KZFPs.

[0071] In one aspect, the KZFP will be selected from the group comprising ZNF671, ZNF776, ZNF586, ZNF552, ZNF587B, ZNF417, ZNF107, ZNF121, ZNF200, ZNF239, ZNF473, ZNF547, ZNF558, ZNF587, ZNF695, ZNF7, ZNF700, ZNF749, ZNF766, ZNF783, ZNF789, ZNF814, ZNF841, ZNF8-ERVK3-1 and ZNF850, or a combination of one or more thereof, e.g. two or more, three or more, four or more, five or more, six or more, seven or more, ten or more, fifteen or more, twenty or more, or the complete set of the 25 KZFPs.

[0072] In a preferred aspect, the KZFP will be selected from the group comprising ZNF107, ZNF121, ZNF200, ZNF239, ZNF473, ZNF547, ZNF558, ZNF587, ZNF695, ZNF7, ZNF700, ZNF749, ZNF766, ZNF783, ZNF789, ZNF814, ZNF841, ZNF8-ERVK3-1 and ZNF850, or a combination of one or more thereof, e.g. two or more, three or more, four or more, five or more, six or more, seven or more, ten or more, fifteen or more, or the complete set of the 19 KZFPs.

[0073] In a more preferred aspect, the KZFP will be selected from the group comprising ZNF121, ZNF200, ZNF473, ZNF547, ZNF587, ZNF7, ZNF749, ZNF766, ZNF814, and ZNF850, or a combination of one or more thereof, e.g. two or more, three or more, four or more, five or more, six or more, seven or more, nine or more, or the complete set of the 10 KZFPs.

[0074] In one aspect, the KZFP will be selected from the group comprising SEQ ID No. 12, SEQ ID No. 14, SEQ ID No. 64, SEQ ID No. 82, SEQ ID No. 130, SEQ ID No. 156, SEQ ID No. 182, SEQ ID No. 204, SEQ ID No. 210, and SEQ ID No. 232, a fragment or a variant thereof or a combination of one or more thereof.

[0075] In other aspects, the agent inhibits and/or impairs the binding of the KZFP to a target genomic DNA (e.g. by targeting the DNA comprising transposable element-embedded regulator sequences (TEeRS) or the zinc-finger motif of the C2H2 zinc finger motif and/or leading to proteasomal degradation), and/or the agent inhibits or impairs the binding of KZFP to its interacting protein(s) or other molecule(s) via which it controls heterochromatin and DNA methylation (e.g. scaffold protein KAP1).

[0076] In other aspects, the agent is an antibody, or antigen binding fragment thereof, that i) inhibits and/or impairs the binding of the KZFP to a target genomic DNA (e.g. by specifically targeting the zinc-finger motif of the C2H2 zinc finger motif), and/or the binding of KZFP to its interacting protein(s) or other molecule(s).

[0077] As used herein, an “antibody” is a protein molecule that reacts with a specific antigenic determinant or epitope and belongs to one or five distinct classes based on structural properties: IgA, IgD, IgE, IgG and IgM. The antibody may be a polyclonal (e.g. a polyclonal serum) or a monoclonal antibody, including but not limited to fully assembled antibody, single chain antibody, antibody fragment, and chimeric antibody, humanized antibody as long as these molecules are still biologically active and still bind to at least one peptide or protein of the invention. Preferably the antibody is a monoclonal antibody. Preferably also the monoclonal antibody will be selected from the group comprising IgG1, IgG2, IgG2a, IgG2b, IgG3 and IgG4 or a combination thereof. Most preferably, the monoclonal antibody is selected from the group comprising IgG1, IgG2, IgG2a, and IgG2b, or a combination thereof.

[0078] An “antigen binding fragment” comprises a portion of a full-length antibody. Examples of antigen binding fragments include Fab, Fab′, F(ab′)2, and Fv fragments; diabodies; linear antibodies; single-chain antibody molecules; and multispecific antibodies formed from antibody fragments.

[0079] The present invention also provides an agent modulating the expression and/or activity of one or more transcript, preferably one or more mRNA, encoding a KZFP of the invention, for use in the treatment and/or prevention of cancer and/or cancer metastasis in a subject in need thereof. Preferably, the agent of the invention modulates the expression and/or activity by inhibiting the translation of said one or more mRNA encoding a KZFP.

[0080] As used herein, a messenger RNA (mRNA) refers to a single-stranded RNA molecule that is complementary to one of the DNA strands of a gene, e.g. a gene encoding a KZFP. The mRNA is an RNA version of the gene that leaves the cell nucleus and moves to the cytoplasm where proteins are made.

[0081] Since a single gene often has more than one transcript, one or ordinary skill in the art will appreciate that the term mRNA also encompasses fragments and variants of an mRNA of the invention. Non-limiting examples of mRNA variants comprise precursor mRNA and splicing variants. Alternative splicing is a widely used mechanism for the formation of isoforms or splicing variants. In this process, which occurs during gene expression, the exons of a gene may be included or excluded in the processed mRNA.

[0082] Preferably, the at least one transcript encoding a KZFP of the invention is selected from the group comprising, represented by, or corresponding to, cDNA sequences: SEQ ID No. 11, SEQ ID No. 13, SEQ ID No. 63, SEQ ID No. 81, SEQ ID No. 129, SEQ ID No. 155, SEQ ID No. 181, SEQ ID No. 203, SEQ ID No. 209, and SEQ ID No. 231, a fragment or a variant thereof or a combination of one or more thereof.

[0083] As used herein, the term “variant” refers to biologically active derivatives of a nucleic acid or peptide sequence. In general, the term “variant” refers to molecules having a native sequence and structure with one or more additions, substitutions (generally conservative in nature) and/or deletions (e.g. alternative splicing variants), relative to the native molecule, so long as the modifications do not destroy biological activity and which are “substantially homologous” to the reference molecule. In general, the sequences of such variants are functionally, i.e. biologically, active variants and will have a high degree of sequence homology to the reference sequence, e.g., sequence homology of more than 50%, generally more than 60%-70%, even more particularly 80% or more, such as at least 90% or 95% or more, when the two sequences are aligned.

[0084] Alternatively, the term “variant” also refers to post-transcriptionally modified nucleic acid sequences of the invention, i.e. methylation, phosphorylation, etc. . . .

[0085] As used herein, a “fragment” of one or more nucleic acid sequence or polypeptide sequence of the invention refers to a sequence containing less nucleotides or amino acids in length than the respective sequences of the invention while retaining the biological activity described herein. Preferably, this fragment contains, at least 10%, 20%, 30%, 40%, 50%, 60%, 70%, 80%, or 90% of the entire length of the reference nucleic acid sequence or polypeptide sequence.

[0086] As used herein, “Homology” refers to the percent identity between two polynucleotide or two polypeptide sequences. Two nucleic acid, or two polypeptide sequences are “substantially homologous” to each other when the sequences exhibit at least about 50% sequence identity, preferably at least about 75% sequence identity, more preferably at least about 80% sequence identity, more preferably at least about 90% sequence identity, and most preferably at least about 95%-98% sequence identity over a defined length of the molecules. As used herein, substantially homologous also refers to sequences showing complete identity to the specified sequence.

[0087] In general, “identity” refers herein to an exact nucleotide to nucleotide or amino acid to amino acid correspondence of two polynucleotides or polypeptide sequences, respectively. Percent identity can be determined by a direct comparison of the sequence information between two molecules by aligning the sequences, counting the exact number of matches between the two aligned sequences, dividing by the length of the shorter sequence, and multiplying the result by 100. Sequence identity is typically measured using sequence analysis software (for example, Sequence Analysis Software Package of the Genetics Computer Group, University of Wisconsin Biotechnology Center, 1710 University Avenue, Madison, Wis. 53705, BLAST, BESTFIT, GAP, or PILEUP/PRETTYBOX programs). Such software matches identical or similar sequences by assigning degrees of homology to various substitutions, deletions, and/or other modifications.

[0088] Alternatively, homology can be determined by readily available computer programs or by hybridization of polynucleotides under conditions which form stable duplexes between homologous regions, followed by digestion with single stranded specific nuclease(s), and size determination of the digested fragments. DNA sequences that are substantially homologous can be identified in a Southern hybridization experiment under, for example, stringent conditions, as defined for that particular system. Defining appropriate hybridization conditions is within the skill of the art.

[0089] The present invention further provides an agent modulating the expression and/or activity of one or more KZFP gene of the invention, for use in the treatment and/or prevention of cancer and/or cancer metastasis in a subject in need thereof.

[0090] Preferably, the agent of the invention modulates the expression and/or activity by inhibiting the transcription of one or more KZFP gene encoding a KZFP.

[0091] Also envisioned are combinations of one or more approaches or agents described herein for use in the treatment and/or prevention of cancer and/or cancer metastasis in a subject in need thereof.

[0092] Preferably, the agent of the invention is selected from the group comprising a nucleic acid, a chemical compound, a peptide or analog thereof, an antibody or an antigen-binding fragment thereof, and an antibody mimetic, or a combination of one or more thereof.

[0093] As used herein, a “chemical agent” is a compound that produces change by virtue of its chemical composition and its effects on living tissues and organisms. The chemical agent may be a small molecule inhibitor (SMI) and is preferably a non-peptidyl molecule inhibitor of KZFPs.

[0094] The chemical agents of the invention can be tested using a number of techniques known to those of skill in the art. For example, tagged KZFPs or cell lines transfected and expressing a KZFP coupled to a reporter gene such as Luciferase or green fluorescent protein may be used in assay screens for inhibitors of KZFPs. Computational zinc finger docking and biochemical analysis can be conducted in order to identify molecules able to bring ZNF proteins to the Cereblon complex for subsequent ubiquitination and proteasomal degradation Non-limiting examples of chemical agents modulating the expression and/or activity of one or more KZFP of the invention are selected among the non-limiting group comprising agents inducing ubiquitination and proteasomal degradation. Non-limiting examples of such agents comprise thalidomide and its analogues and derivatives (e.g. lenalidomide and pomalidomide).

[0095] The terms “polypeptide,” “peptide” and “protein” are used interchangeably to refer to a polymer of amino acid residues. The term also applies to amino acid polymers in which one or more amino acids are chemical analogues or modified derivatives of corresponding naturally-occurring amino acids.

[0096] In case the agent of the invention is a peptide, then it will preferably be conjugated to an agent that increases the accumulation of the peptide in the cancer cell. Such an agent can be a compound which induces receptor mediated endocytosis such as for example the membrane transferrin receptor mediated endocytosis of transferrin conjugated to therapeutic drugs (Qian Z. M. et al., “Targeted drug delivery via the transferrin receptor-mediated endocytosis pathway” Pharmacological Reviews, 54, 561, 2002) or a cell membrane permeable carrier which can, be selected e.g. among the group of fatty acids such as decanoic acid, myristic acid and stearic acid, which have already been used for intracellular delivery of peptide inhibitors of protein kinase C (Ioannides C. G. et al., “Inhibition of IL-2 receptor induction and IL-2 production in the human leukemic cell line Jurkat by a novel peptide inhibitor of protein kinase C” Cell Immunol., 131, 242, 1990) and protein-tyrosine phosphatase (Kole H. K. et al., “A peptide-based protein-tyrosine phosphatase inhibitor specifically enhances insulin receptor function in intact cells” J. Biol. Chem. 271, 14302, 1996) or among peptides. Preferably, cell membrane permeable carriers are used, more preferably a cell membrane permeable carrier peptide is used.

[0097] In case the cell membrane permeable carrier is a peptide then it will preferably be a positively charged amino acid rich peptide. Preferably such positively charged amino acid rich peptide is an arginine rich peptide. It has been shown in Futaki et al. (Futaki S. et al., “Arginine-rich peptides. An abundant source of membrane-permeable peptides having potential as carriers for intracellular protein delivery” J. Biol. Chem., 276, 5836, 2001), that the number of arginine residues in a cell membrane permeable carrier peptide has a significant influence on the method of internalization and that there seems to be an optimal number of arginine residues for the internalization, preferably they contain more than 6 arginines, more preferably they contain 9 arginines (R9).

[0098] The peptide may be conjugated to the cell membrane permeable carrier by a spacer (e.g. two glycine residues). In this case, the cell membrane permeable carrier is preferably a peptide. Usually, arginine rich peptides are selected from the group comprising the HIV-TAT 48-57 peptide, the FHV-coat 35-49 peptide, the HTLV-II Rex 4-16 peptide and the BMV gag 7-25 peptide. Preferably, the arginine rich peptide is HIV-TAT 48-57 peptide.

[0099] Since an inherent problem with native peptides (in L-form) is degradation by natural proteases, the peptide, as well as the cell membrane permeable peptide, of the invention may be prepared to include D-forms and/or “retro-inverso isomers” of the peptide.

[0100] In this case, retro-inverso isomers of fragments and variants of the peptide, as well as of the cell membrane permeable peptide, of the invention are prepared according to techniques known in the art.

[0101] The agent of the invention may also be a “nucleic acid”. The terms “nucleic acid,” “polynucleotide,” and “oligonucleotide” are used interchangeably and refer to a deoxyribonucleotide or ribonucleotide polymer, in linear or circular conformation, and in either single- or double-stranded form. For the purposes of the present disclosure, these terms are not to be construed as limiting with respect to the length of a polymer. The terms can encompass known analogues of natural nucleotides, as well as nucleotides that are modified in the base, sugar and/or phosphate moieties (e.g., phosphorothioate backbones). In general, an analogue of a particular nucleotide has the same base-pairing specificity; i.e., an analogue of A will base-pair with T.

[0102] Examples of nucleic acid agents of the invention comprise those selected among the group comprising an acid nucleic encoding an miRNA, an siRNA, a piRNA, an hnRNA, an snRNA, an sg RNA, an esiRNA, an shRNA, and an antisense oligonucleotide (e.g. modified ASO), or a combination thereof.

[0103] The terms “microRNA,” “miRNA,” and “MiR” are interchangeable and refer to endogenous or artificial non-coding RNAs that are capable of regulating gene expression. It is believed that miRNAs function via RNA interference.

[0104] The terms “siRNA” and “short interfering RNA” are interchangeable and refer to single-stranded or double-stranded RNA molecules that are capable of inducing RNA interference. SiRNA molecules typically have a duplex region that is between 18 and 30 base pairs in length.

[0105] The terms “piRNA” and “Piwi-interacting RNA” are interchangeable and refer to a class of small RNAs involved in gene silencing. PiRNA molecules typically are between about 26 and about 31 nucleotides in length.

[0106] Examples of antisense oligonucleotides (ASOs) include the GapmeRs. As used herein, a GapmeR is a chimeric antisense oligonucleotide that contains a central block of deoxynucleotide monomers sufficiently long to induce RNase H cleavage. Usually, the GapmeRs of the invention are directed against one or more mRNA encoding a KZFP of the invention. Modified ASOs such as modified GapmeRs are also encompassed in the present invention and comprise, e.g. GapmeRs with fixed chemical modification architectures selected from the group comprising i) a gapmer with five 2′-O-methoxyethyl (MOE) modifications in each flank, and a central gap of 10 unmodified dans (e.g. 5-10-5 MOE design), and ii) a gapmer employing three or four locked nucleic acid (LNA) modifications in each flank (e.g. 3-10-3 or 4-8-4 LNA designs), as well as a combination of one or more thereof.

[0107] The terms “sgRNA” and “guideRNA” are interchangeable and refer to a specific RNA sequence that recognizes the target DNA region of interest and directs the endonuclease there for editing. The gRNA is usually made up of two parts: crispr RNA (crRNA), a 17-20 nucleotide sequence complementary to the target DNA, and a tracr RNA, which serves as a binding scaffold for the Cas nuclease.

[0108] Any suitable engineered sgRNA, or crRNA and tracrRNA, can be employed as long as it is effective for recognizing a target DNA of the invention. The design of such sgRNA, or crRNA and tracrRNA, is within the skill of ordinary artisans.

[0109] The terms “shRNA” as used herein refers to a nucleic acid molecule comprising at least two complementary portions hybridized or capable of specifically hybridizing to form a duplex structure sufficiently long to mediate RNAi (typically between about 15 to about 29 nucleotides in length), and at least one single-stranded portion, typically between approximately 1 and about 10 nucleotides in length that forms a loop connecting the ends of the two sequences that form the duplex. Exemplary shRNA of the invention may, e.g. be selected from the non-limiting group comprising those listed in table 2 (represented by their DNA sequence) that were designed to be uniquely and selectively recognizing a target sequence within an mRNA encoding a KZFP, or a combination of KZFP, of the invention. Selecting a suitable shRNA is well within the competences of one of ordinary skill in the art using routine experimentation, several commercial and noncommercial web sites available for shRNA design as well as the information are provided herein.

[0110] Non-limiting examples of target sequences within an mRNA encoding a KZFP, or a combination of KZFP, of the invention are also given in Table 2. One of ordinary skill in the art, using routine experimentation, several available commercial and noncommercial web sites for determining said target sequences as well as relevant information provided herein is able to determine a target sequence within an mRNA encoding a KZFP, or a combination of KZFP

TABLE 2

| KZFP | Target Sequence | Hairpin Sequence (DNA sequence) |
|---|---|---|
| ZNF586 v.1 | GCTTATACATCTAGTCTCATT | 5′-CCGG-GCTTATACATCTAGTCTCATT-CTCGAG |
| | (SEQ ID No. 17) | AATGAGACTAGATGTATAAGC-TTTTT-3′ |
| | | (SEQ ID No. 18) |
| ZNF586 v.2 | GCAGCAAATATGGGAAATTAT | 5′-CCGG-GCAGCAAATATGGGAAATTAT-CTCGAG- |
| | (SEQ ID No. 19) | ATAATTTCCCATATTTGCTGC-TTTTT-3′ |
| | | (SEQ ID No. 20) |
| ZNF671 v.1 | GCCAAAGCTATGACCTCTTTA | 5′-CCGG-GCCAAAGCTATGACCTCTTTA-CTCGAG- |
| | (SEQ ID No. 21) | TAAAGAGGTCATAGCTTTGGC-TTTTT-3′ |
| | | (SEQ ID No. 22) |
| ZNF587- | AGTCGAAAGAGCAGCCTTATT | 5′-CCGG-AGTCGAAAGAGCAGCCTTATT-CTCGAG- |
| ZNF417 v.1 | (SEQ ID No. 23) | AATAAGGCTGCTCTTTCGACT-TTTTTTGAAT-3′ |
| | | (SEQ ID No. 24) |
| ZNF587- | GCAGCATATTGGAGAGAAATT | 5′-CCGG-GCAGCATATTGGAGAGAAATT-CTCGAG- |
| ZNF417 v.2 | (SEQ ID No. 25) | AATTTCTCTCCAATATGCTGC-TTTTT-3′ |
| | | (SEQ ID No. 26) |
| ZNF671 v.2 | CGGGAAGAATGGGAGCTTCTT | 5′-CCGG-CGGGAAGAATGGGAGCTTCTT-CTCGAG- |
| | (SEQ ID No. 27) | AAGAAGCTCCCATTCTTCCCG-TTTTT-3′ |
| | | (SEQ ID No. 28) |
| ZNF776 v.1 | CGGGAGAAAGACATCATGAAT | 5′-CCGG-CGGGAGAAAGACATCATGAAT-CTCGAG- |
| | (SEQ ID No. 29) | ATTCATGATGTCTTTCTCCCG-TTTTT-3′ |
| | | (SEQ ID No. 30) |
| ZNF776 v.2 | TATGTCACATGAGCCATTTAT | 5′-CCGG-TATGTCACATGAGCCATTTAT-CTCGAG- |
| | (SEQ ID No. 31) | ATAAATGGCTCATGTGACATA-TTTTTG-3′ |
| | | (SEQ ID No. 32) |
| ZNF552 v.1 | GCAGATCATCAGGGAACACAT | 5′-CCGG-GCAGATCATCAGGGAACACAT-CTCGAG- |
| | (SEQ ID No. 33) | ATGTGTTCCCTGATGATCTGC-TTTTT-3′ |
| | | (SEQ ID No. 34) |
| ZNF552 v.2 | GCTCTACATTCCGTGTTCATA | 5′-CCGG-GCTCTACATTCCGTGTTCATA-CTCGAG- |
| | (SEQ ID No. 35) | TATGAACACGGAATGTAGAGC-TTTTT-3′ |
| | | (SEQ ID No. 36) |
| ZNF552- | CCTTCTAAGCAGAGTATTTAT | 5′-CCGG-CCTTCTAAGCAGAGTATTTAT-CTCGAG- |
| ZNF587B- | (SEQ ID No. 37) | ATAAATACTCTGCTTAGAAGG-TTTTT-3′ |
| ZNF814 v.1 | | (SEQ ID No. 38) |
| ZNF552- | CAGCACCAGAATGAGCACATT | 5′-CCGG-CAGCACCAGAATGAGCACATT-CTCGAG- |
| ZNF587B- | (SEQ ID No. 39) | AATGTGCTCATTCTGGTGCTG-TTTTT-3′ |
| ZNF814 v.2 | | (SEQ ID No. 40) |
| ZNF552- | GCAGATCATCAGGGAACACAT | 5′-CCGG-GCAGATCATCAGGGAACACAT-CTCGAG- |
| ZNF587B- | (SEQ ID No. 41) | ATGTGTTCCCTGATGATCTGC-TTTTT-3′ |
| ZNF814 v.3 | | (SEQ ID No. 42) |

[0111] It is also understood that the above target sequences can be recognized and targeted also by any miRNA, siRNA, piRNA, hnRNA, snRNA, sg RNA, esiRNA, and antisense oligonucleotide (e.g. modified ASO) of the invention.

[0112] The terms “snRNA” and “small nuclear RNA” are interchangeable and refer to a class of small RNAs involved in a variety of processes including RNA splicing and regulation of transcription factors. The subclass of small nucleolar RNAs (snoRNAs) is also included. The term is also intended to include artificial snRNAs, such as antisense derivatives of snRNAs.

[0113] In particular, the invention therefore provides isolated siRNA comprising short double-stranded RNA from about 18 to about 30 nucleotides in length, that are targeted to the mRNA encoding a KZFP of the invention.

[0114] The term “isolated” means altered or removed from the natural state through human intervention. For example, an siRNA naturally present in a living animal is not “isolated,” but a synthetic siRNA, or an siRNA partially or completely separated from the coexisting materials of its natural state is “isolated.” An isolated siRNA can exist in substantially purified form, or can exist in a non-native environment such as, for example, a cell into which the siRNA has been delivered. The siRNAs of the invention can comprise partially purified RNA, substantially pure RNA, synthetic RNA, or recombinantly produced RNA, as well as altered RNA that differs from naturally occurring RNA by the addition, deletion, substitution and/or alteration of one or more nucleotides. Such alterations can include addition of non-nucleotide material, such as to the end(s) of the siRNA or to one or more internal nucleotides of the siRNA, including modifications that make the siRNA resistant to nuclease digestion.

[0115] One or both strands of the siRNA of the invention can also comprise a 3′ overhang. A “3′ overhang” refers to at least one unpaired nucleotide extending from the 3′-end of an RNA strand. Thus, in one aspect, the siRNA of the invention comprises at least one 3′ overhang of from one to about six nucleotides (which includes ribonucleotides or deoxynucleotides) in length, preferably from one to about five nucleotides in length, more preferably from one to about four nucleotides in length, and particularly preferably from about one to about two nucleotides in length.

[0116] In the case both strands of the siRNA molecule comprise a 3′ overhang, the length of the overhangs can be the same or different for each strand. In a most preferred embodiment, the 3′ overhang is present on both strands of the siRNA, and is two nucleotides in length. In order to enhance the stability of the present siRNAs, the 3′ overhangs can also be stabilized against degradation. In one embodiment, the overhangs are stabilized by including purine nucleotides, such as adenosine or guanosine nucleotides.

[0117] Alternatively, substitution of pyrimidine nucleotides by modified analogues, e.g., substitution of uridine nucleotides in the 3′ overhangs with 2′-deoxythymidine, is tolerated and does not affect the efficiency of RNAi degradation. In particular, the absence of a 2′ hydroxyl in the 2′-deoxythymidine significantly enhances the nuclease resistance of the 3′ overhang in tissue culture medium.

[0118] The siRNAs of the invention can be targeted to any stretch of approximately about 18-30, preferably about 19-25 contiguous nucleotides in any of the target mRNA sequences (including the mRNA encoding a KZFP of the invention). Techniques for selecting target sequences for siRNA are well known in the art. Thus, the sense strand of the present siRNA comprises a nucleotide sequence identical to any contiguous stretch of about 18 to about 30 nucleotides in the target mRNA.

[0119] The siRNAs of the invention can be obtained using a number of techniques known to those of skill in the art. For example, the siRNAs can be chemically synthesized or recombinantly produced using methods known in the art. Preferably, the siRNA of the invention are chemically synthesized using appropriately protected ribonucleoside phosphoramidites and a conventional DNA/RNA synthesizer. The siRNA can be synthesized as two separate, complementary RNA molecules, or as a single RNA molecule with two complementary regions. Commercial suppliers of synthetic RNA molecules or synthesis reagents include Proligo (Hamburg, Germany), Dharmacon Research (Lafayette, Colo., USA), Pierce Chemical (part of Perbio Science, Rockford, Ill., USA), Glen Research (Sterling, Va., USA), ChemGenes (Ashland, Mass., USA), Qiagen (Hilden, Germany) and Cruachem (Glasgow, UK).

[0120] Alternatively, siRNA can also be expressed from recombinant circular or linear DNA plasmids using any suitable promoter. Suitable promoters for expressing siRNA of the invention from a plasmid include, for example, the U6 or H1 RNA pol III promoter sequences and the cytomegalovirus promoter. Selection of other suitable promoters is within the skill in the art. The recombinant plasmids of the invention can also comprise inducible or regulatable promoters for expression of the siRNA in a particular tissue or in a particular intracellular environment. The siRNA expressed from recombinant plasmids either can be isolated from cultured cell expression systems by standard techniques or can be expressed intracellularly.

[0121] The siRNAs of the invention can also be expressed from recombinant viral vectors intracellularly in cells. The recombinant viral vectors comprise sequences encoding the siRNAs of the invention and any suitable promoter for expressing the siRNA sequences.

[0122] Suitable promoters include, for example, the U6 or H1 RNA pol III promoter sequences and the cytomegalovirus promoter. Selection of other suitable promoters is within the skill in the art. The recombinant viral vectors of the invention can also comprise inducible or regulatable promoters for expression of the siRNA in a particular tissue.

[0123] Any RNA-targeting oligonucleotide can be considered as ASOs, although they may act through different mechanisms. Specific and strong recognition and binding to the mRNA target is accomplished through Watson-Crick base pairing, which may or may not be augmented by chemical modifications to the AON internucleotide phosphate linkages, backbone sugars, or nucleobases. The majority of ASOs can be divided into one of two groups: those that direct cleavage of the target mRNA, and those that alter mRNA translation without causing mRNA cleavage.

[0124] The present invention also contemplates a gene delivery vector, preferably in the form of a plasmid (circular or linear plasmid) or a vector, that comprises one or more nucleic acid(s) encoding an agent modulating the expression and/or activity of one or more KZFP of the invention.

[0125] Preferably, said one or more nucleic acid(s) encodes the siRNA, miRNA, piRNA, hnRNA, snRNA, sg RNA, CRISPR-based loss-of-function system, esiRNA, shRNA, and antisense oligonucleotide, or combination of one or more thereof, of the invention. Most preferably, the nucleic acid including an antisense oligonucleotide is selected from the group comprising an antisense oligonucleotide (ASO) and a modified ASO.

[0126] As used herein, a “vector” or a “gene delivery vector” is capable of transferring nucleic acid sequences to target cells (e.g., viral vectors, non-viral vectors, particulate carriers, and liposomes). Preferably, the nucleic acid is one or more nucleic acid(s) of the invention.

[0127] Suitable vectors include derivatives of SV40 and known bacterial plasmids, e.g., E. coli plasmids col E1, pCR1, pBR322, pMB9 and their derivatives, plasmids such as RP4; phage DNAs, e.g., the numerous derivatives of phage X, e.g., NM989, and other phage DNA, e.g., Ml 3 and filamentous single stranded phage DNA; yeast plasmids such as the 2μ plasmid or derivatives thereof; vectors useful in eukaryotic cells, such as vectors useful in insect or mammalian cells; vectors derived from combinations of plasmids and phage DNAs, such as plasmids that have been modified to employ phage DNA or other expression control sequences; and the like (for a review, Sung, Y., Kim, S. Recent advances in the development of gene delivery systems. Biomater Res 23, 8 (2019)).

[0128] Various viral vectors are used for delivering nucleic acids to cells in vitro or in vivo. Non-limiting examples are vectors based on Herpes Viruses, Pox-viruses, Adeno-associated virus, Lentivirus, and others. In principle, all of them are suited to deliver the expression cassette comprising an expressible nucleic acid molecule that codes for an agent modulating the expression and/or activity of one or more KZFP of the invention. In a preferred aspect, said viral vector is an adenoviral vector, preferably a replication competent adenovirus.

[0129] The present invention also contemplates a host cell comprising i) a plasmid or vector of the invention, or ii) one or more nucleic acid(s) encoding the siRNA, miRNA, piRNA, hnRNA, snRNA, sg RNA, CRISPR-based loss-of-function system, esiRNA, shRNA, and antisense oligonucleotide, or combination of one or more thereof, of the invention.

[0130] The gene delivery vector (e.g. plasmid or vector) comprising one or more nucleic acid(s) the siRNA, miRNA, piRNA, hnRNA, snRNA, sg RNA, CRISPR-based loss-of-function system, esiRNA, shRNA, and antisense oligonucleotide, or combination of one or more thereof, of the invention, or the one or more nucleic acid(s) of the invention, can be introduced to host cell via one or more methods known in the art. These one or more methods include, without limitation, microinjection, electroporation, calcium phosphate-mediated transfection, cationic transfection, liposome transfection, dendrimer transfection, heat shock transfection, nucleofection transfection, magnetofection, lipofection, optical transfection, proprietary agent-enhanced uptake of nucleic acids, and delivery via liposomes, immunoliposomes, virosomes, or artificial virions.

[0131] It will be appreciated that in the present method the modification following the introduction of the gene delivery vector (plasmid or vector), or the one or more nucleic acid(s) of the invention, to the host cell may occur ex vivo or in vitro, for instance in a cell culture and in some instances not in vivo. In other aspects, it may occur in vivo.

[0132] The present invention further contemplates one or more compositions. In one aspect, the composition comprises:
[0133] an agent modulating the expression and/or activity of one or more i) KZFP, ii) mRNA encoding a KZFP and/or iii) KZFP gene, of the invention, or
[0134] a plasmid or a vector of the invention, or
[0135] a host cell of the invention.

[0136] The present invention further contemplates one or more pharmaceutical compositions. In one aspect, the pharmaceutical composition comprises:
[0137] a therapeutically effective amount of an agent modulating the expression and/or activity of one or more i) KZFP, ii) mRNA encoding a KZFP and/or iii) KZFP gene, of the invention, or
[0138] a plasmid or a vector of the invention, or
[0139] a host cell of the invention,
   and a pharmaceutically acceptable carrier or diluent.

[0140] In one aspect, the pharmaceutical composition of the invention is for use in the treatment and/or prevention of cancer and/or cancer metastasis.

[0141] The term “therapeutically effective amount” as used herein means an amount of an agent of the invention high enough to significantly positively modify the symptoms and/or condition to be treated, but low enough to avoid serious side effects (at a reasonable risk/benefit ratio), within the scope of sound medical judgment. The therapeutically effective amount of the agent of the invention is selected in accordance with a variety of factors including type, species, age, weight, sex and medical condition of the patient; the severity of the condition to be treated; the route of administration; the renal and hepatic function of the patient. A physician of ordinary skill in the art can readily determine and prescribe the effective amount of the agent required to prevent, counter or arrest the progress of the cancer.

[0142] “Pharmaceutically acceptable carrier or diluent” means a carrier or diluent that is useful in preparing a pharmaceutical composition that is generally safe, non-toxic, and desirable, and includes carriers or diluents that are acceptable for human pharmaceutical use.

[0143] Such pharmaceutically acceptable carriers can be sterile liquids, such as water and oils, including those of petroleum, animal, vegetable or synthetic origin, such as peanut oil, soybean oil, mineral oil, sesame oil and the like. Water is a preferred carrier when the pharmaceutical composition is administered intravenously. Saline solutions and aqueous dextrose and glycerol solutions can also be employed as liquid carriers, particularly for injectable solutions.

[0144] Pharmaceutically acceptable excipients include starch, glucose, lactose, sucrose, sodium stearate, glycerol monostearate, talc, sodium chloride, dried skim milk, glycerol, propylene glycol, water, ethanol and the like.

[0145] The pharmaceutical compositions may further contain one or more pharmaceutically acceptable salts such as, for example, a mineral acid salt such as a hydrochloride, a hydrobromide, a phosphate, a sulfate, etc.; and the salts of organic acids such as acetates, propionates, malonates, benzoates, etc. Additionally, auxiliary substances, such as wetting or emulsifying agents, pH buffering substances, gels or gelling materials, flavorings, colorants, microspheres, polymers, suspension agents, etc. may also be present herein. In addition, one or more other conventional pharmaceutical ingredients, such as preservatives, humectants, suspending agents, surfactants, antioxidants, anticaking agents, fillers, chelating agents, coating agents, chemical stabilizers, etc. may also be present, especially if the dosage form is a reconstitutable form. Suitable exemplary ingredients include macrocrystalline cellulose, carboxymethyf cellulose sodium, polysorbate 80, phenyletbyl alcohol, chiorobutanol, potassium sorbate, sorbic acid, sulfur dioxide, propyl gallate, the parabens, ethyl vanillin, glycerin, phenol, parachlorophenol, gelatin, albumin and a combination thereof. A thorough discussion of pharmaceutically acceptable excipients is available in REMINGTON'S PHARMACEUTICAL SCIENCES (Mack Pub. Co., N.J. 1991) which is incorporated by reference herein.

[0146] The pharmaceutical composition can also further comprise, or comprise the administration of, at least one additional anticancer agent or therapy selected from the group comprising radiotherapy, chemotherapy, immunotherapy, inhibitors of DNA methylation, targeted therapy and hormone therapy, or a combination of one of more thereof.

[0147] A chemotherapy of the present invention can concern as well agents that damage DNA and/or prevent cells from multiplying, such as genotoxins.

[0148] Genotoxins can be selected from the group comprising alkylating agents, antimetabolites, DNA cutters, DNA binders, topoisomerase poisons and spindle poisons. Examples of alkylating agents are lomustine, carmustine, streptozocin, mechlorethamine, melphalan, uracil nitrogen mustard, chlorambucil, cyclosphamide, iphosphamide, cisplatin, carboplatin, mitomycin, thiotepa, dacarbazin, procarbazine, hexamefhyl melamine, triethylene melamine, busulfan, pipobroman, mitotane and other platine derivatives or a combination of one of more thereof.

[0149] An example of DNA cutters is bleomycin.

[0150] Topoisomerases poisons can be selected from the group comprising topotecan, irinotecan, camptothecin sodium salt, daorubicin, doxorubicin, idarubicin, mitoxantrone teniposide, adriamycin and etoposide or a combination of one of more thereof.

[0151] Examples of DNA binders are dactinomycin and mithramycin whereas spindle poisons can be selected among the group comprising vinblastin, vincristin, navelbin, paclitaxel and docetaxel or a combination of one of more thereof.

[0152] A chemotherapy of the present invention can concern as well antimetabolites selected among the following non-limiting list of compounds: methotrexate, trimetrexate, pentostatin, cytarabin, ara-CMP, fludarabine phosphate, hydroxyurea, fluorouracyl, fioxuridine, chlorodeoxyadenosine, gemcitabine, thioguanine and 6-mercaptopurine or a combination of one of more thereof.

[0153] Radiotherapy refers to the use of high-energy radiation to shrink tumors and kill cancer cells. Examples of radiation therapy include, without limitation, external radiation therapy and internal radiation therapy (also called brachytherapy) or a combination of one of more thereof. External radiation therapy is most common and typically involves directing a beam of direct or indirect ionizing radiation to a tumor or cancer site. While the beams of radiation, the photons, the Cobalt or the particule therapy are focused to the tumor or cancer site, it is nearly impossible to avoid exposure of normal, healthy tissue. Energy source for external radiation therapy is selected from the group comprising direct or indirect ionizing radiation (for example: x-rays, gamma rays and particle beams or combination thereof).

[0154] Internal radiation therapy involves implanting a radiation-emitting source, such as beads, wires, pellets, capsules, etc., inside the body, at, or near to the tumor site. Energy source for internal radiation therapy is selected from the group of radioactive isotopes comprising: iodine (iodine125 or iodine131), strontium89, radioisotopes of phosphorous, palladium, cesium, indium, phosphate, or cobalt, and combination thereof. Such implants can be removed following treatment or left in the body inactive. Types of internal radiation therapy include, but are not limited to, interstitial, and intracavity brachytherapy (high dose rate, low dose rate, pulsed dose rate).

[0155] Another internal radiation therapy involves biological carriers of radioisotopes, such as with radio-immunotherapy wherein tumor-specific antibodies bound to radioactive material are administered to a patient. The antibodies bind tumor antigens, thereby effectively administering a dose of radiation to the relevant tissue.

[0156] Methods of administering radiation therapy are well known to those of skill in the art. Immunotherapy refers to the use of monoclonal antibodies, immune checkpoint inhibitors, cancer vaccines, cytokines, immunomodulators, Chimeric antigen receptor T (CAR-T) cells, T-cell receptor (TCR-T) cells or other adoptive cell therapies (such as e.g. Tumor Infiltrating Lymphocytes TILs). In a preferred aspect, the immunotherapy is selected from the group comprising monoclonal antibodies (e.g. targeting the protein CD20 such as Rituximab), immune checkpoint inhibitors or a combination of one or more thereof. Examples of immune checkpoint proteins targeted by inhibitors include PD-1/PD-L1, TIM-3, LAG-3 and CTLA-4/B7-1/B7-2.

[0157] Inhibitors of DNA methylation comprise DNA methyltransferase inhibitors (DNMTi). Non-limiting examples of DNMTi comprise nucleoside analogs such as, e.g. azacitide, decitabine, zebularine, guadecitabine, and 4′-thio-2′-deoxycytidine (TdCyd) as well as nonnucleoside analogs such as, e.g. procainamide, hydralazine, SGI-1027, MG98, and N-Phthaloyl-L-tryptophan (RG108). Up to now, the DNMT inhibitors are used to treat a variety of hematological tumors (for a review, see Hu, C., Liu, X., Zeng, Y. et al. DNA methyltransferase inhibitors combination therapy for the treatment of solid tumor: mechanism and clinical application. Clin Epigenet 13, 166 (2021)).

[0158] Targeted therapies are drugs that specifically target the changes inside cells that cause them to become cancer. Unlike chemotherapy drugs, which work by attacking rapidly growing cells in general (including cancer cells), these drugs target one or more specific proteins on or in cancer cells. Non-limiting examples of targeted therapies comprise kinase inhibitors, such as, e.g. Bruton's tyrosine kinase (BTK) inhibitors, Phosphoinositide 3-kinases (PI3K) inhibitors and SRC/ABL kinases.

[0159] Non-limiting examples of kinase inhibitors comprise drugs selected from ibrutinib, dasatinib and acalabrutinib.

[0160] The present invention further contemplates methods of treatment of cancer, and/or cancer metastasis.

[0161] In one aspect, the method of treatment of cancer, and/or cancer metastasis comprises:
[0162] (a) providing an agent of the invention and (b) administering said agent to a subject in need thereof.

[0163] Preferably, said agent is in the form of a pharmaceutical composition comprising a therapeutically effective amount of the agent as described herein.

[0164] In another aspect, the method comprises (a) modifying a host cell as described herein, and (b) reintroducing the host cell (e.g. single cell or population of cells), into the patient in need thereof, i.e. suffering from cancer and/or cancer metastasis. Preferably, said host cell is in the form of a pharmaceutical composition comprising a therapeutically effective amount of the host cell as described herein.

[0165] Administration of the agents and/or pharmaceutical compositions described herein may be accomplished by any acceptable method which allows the agents modulating the expression and/or activity of one or more i) KRAB-containing zinc finger protein (KZFP), ii) mRNA encoding a KZFP, and/or iii) KZFP gene to reach its target. The particular mode selected will depend of course, upon factors such as the particular formulation, the severity of the state of the subject being treated, and the dosage required for therapeutic efficacy. The actual effective amounts of agent (the “drug”) can vary according to the specific drug or combination thereof being utilized, the particular composition formulated, the mode of administration, and the age, weight, condition of the patient, and severity of the symptoms or condition being treated.

[0166] Any acceptable method known to one of ordinary skill in the art may be used to administer the agents and/or pharmaceutical compositions to the subject. The administration may be localized (i.e., to a particular region, physiological system, tissue, organ, or cell type) or systemic, depending on the condition being treated.

[0167] Injections can be e.g., intravenous, intradermal, subcutaneous, intramuscular, or intraperitoneal. The agents and/or pharmaceutical compositions can be injected intradermally for treatment cancer, for example.

[0168] The injections can be given at multiple locations. Implantation includes inserting implantable drug delivery systems, e.g., microspheres, hydrogels, polymeric reservoirs, cholesterol matrixes, polymeric systems, e.g., matrix erosion and/or diffusion systems and non-polymeric systems, e.g., compressed, fused, or partially-fused pellets. Inhalation includes administering the composition with an aerosol in an inhaler, either alone or attached to a carrier that can be absorbed. For systemic administration, it may be preferred that the agents and/or pharmaceutical compositions are encapsulated in liposomes.

[0169] Preferably, the agents and/or pharmaceutical compositions delivery systems are provided in a manner which enables tissue-specific uptake of the agents and/or pharmaceutical compositions delivery systems. Techniques include using tissue or organ localizing devices, such as wound dressings or transdermal delivery systems, using invasive devices such as vascular or urinary catheters, and using interventional devices such as stents having drug delivery capability and configured as expansive devices or stent grafts.

[0170] The agents and/or pharmaceutical compositions may be delivered using a bio-erodible implant by way of diffusion or by degradation of the polymeric matrix.

[0171] The administration of the agents and/or pharmaceutical compositions may be designed so as to result in sequential exposures to the agents and/or pharmaceutical compositions over a certain time period, for example, hours, days, weeks, months or years. This may be accomplished, for example, by repeated administrations of a formulation or by a sustained or controlled release delivery system in which the agents and/or pharmaceutical compositions is/are delivered over a prolonged period without repeated administrations. Administration of the formulations using such a delivery system may be, for example, by oral dosage forms, bolus injections, transdermal patches or subcutaneous implants. Maintaining a substantially constant concentration of the composition may be preferred in some cases.

[0172] Other delivery systems suitable include, but are not limited to, time-release, delayed release, sustained release, or controlled release delivery systems. Such systems may avoid repeated administrations in many cases, increasing convenience to the subject and the physician. Many types of release delivery systems are available and known to those of ordinary skill in the art. They include, for example, polymer-based systems such as polylactic and/or polyglycolic acids, polyanhydrides, polycaprolactones, copolyoxalates, polyesteramides, polyorthoesters, polyhydroxybutyric acid, and/or combinations of these. Microcapsules of the foregoing polymers containing nucleic acids are described in, for example, U.S. Pat. No. 5,075,109. Other examples include nonpolymer systems that are lipid-based including sterols such as cholesterol, cholesterol esters, and fatty acids or neutral fats such as mono-, di- and triglycerides; hydrogel release systems; liposome-based systems; phospholipid based-systems; silastic systems; peptide based systems; wax coatings; compressed tablets using conventional binders and excipients; or partially fused implants. Specific examples include, but are not limited to, erosional systems in which the agent and/or pharmaceutical composition contained in a formulation within a matrix (for example, as described in U.S. Pat. Nos. 4,452,775, 4,675,189, 5,736, 152, 4,667,013, 4,748,034 and 5,239,660), or diffusional systems in which an active component controls the release rate (for example, as described in U.S. Pat. Nos. 3,832,253, 3,854,480, 5,133,974 and 5,407,686). The formulation may be as, for example, microspheres, hydrogels, polymeric reservoirs, cholesterol matrices, or polymeric systems. The system may allow sustained or controlled release of the composition to occur, for example, through control of the diffusion or erosion/degradation rate of the formulation containing the agent and/or pharmaceutical composition. In addition, a pump-based hardware delivery system may be used for delivery.

[0173] Also envisioned is a tumor-specific delivery of an agent and/or pharmaceutical composition—coupled super-paramagnetic iron oxide nanoparticles as known in the art.

[0174] Further contemplated is a method of diagnosing cancer and/or cancer metastasis in a subject comprising:
[0175] (a) detecting, directly or indirectly, and measuring the level of transcription and/or expression and/or activity of one or more KZFP in a sample obtained from said subject;
[0176] (b) comparing the level of transcription and/or expression and/or activity of said one or more KZFP to a control biological sample for the same one or more KZFP;
[0177] wherein a differential transcription and/or expression and/or activity of one or more KZFP in said biological sample, relative to the level of corresponding said one or more KZFP in a control biological sample of a cancer-free subject, is indicative of the subject having cancer and/or cancer metastasis.

[0178] It is understood that the detection and measurement of the level of transcription and/or expression and/or activity of one or more KZFP in a sample obtained can be direct or indirect. For example, the abundance levels of mRNAs can be directly quantitated. Alternatively, the amount of one or more KZFP can be determined indirectly by measuring abundance levels of cDNAs, amplified RNAs or DNAs, or by measuring quantities or activities of RNAs, or other molecules that are indicative of the expression level of the one or more KZFP. Preferably, the detection and measurement of the level of transcription and/or expression and/or activity of one or more KZFP is determined indirectly by measuring abundance levels of cDNAs.

[0179] Transcripts (such as mRNAs), amplified RNAs or DNAs (such as cDNAs) can be detected and quantitated by a variety of methods including, but not limited to, microarray analysis, polymerase chain reaction (PCR), reverse transcriptase polymerase chain reaction (RT-PCR), Northern blot, serial analysis of gene expression (SAGE), immunoassay, and mass spectrometry, as well as any sequencing-based methods known in the art.

[0180] In one aspect, microarrays are used to measure the levels of one or more KZFP of the invention. An advantage of microarray analysis is that the expression of each of the one or more KZFP of the invention can be measured simultaneously, and microarrays can be specifically designed to provide a diagnostic expression profile for a particular disease or condition (e.g., cancer).

[0181] Microarrays are prepared by selecting probes which comprise a polynucleotide sequence, and then immobilizing such probes to a solid support or surface. For example, the probes may comprise DNA sequences, RNA sequences, or copolymer sequences of DNA and RNA. The polynucleotide sequences of the probes may also comprise DNA and/or RNA analogues, or combinations thereof. For example, the polynucleotide sequences of the probes may be full or partial fragments of genomic DNA. The polynucleotide sequences of the probes may also be synthesized nucleotide sequences, such as synthetic oligonucleotide sequences. The probe sequences can be synthesized either enzymatically in vivo, enzymatically in vitro (e.g., by PCR), or non-enzymatically in vitro.

[0182] Probes used in the methods of the invention are preferably immobilized to a solid support which may be either porous or non-porous. For example, the probes may be polynucleotide sequences which are attached to a nitrocellulose or nylon membrane or filter covalently at either the 3′ or the 5′ end of the polynucleotide. Such hybridization probes are well known in the art (see, e.g., Sambrook, et al., Molecular Cloning: A Laboratory Manual (3rd Edition, 2001). Alternatively, the solid support or surface may be a glass or plastic surface. In one embodiment, hybridization levels are measured to microarrays of probes consisting of a solid phase on the surface of which are immobilized a population of polynucleotides, such as a population of DNA or DNA mimics, or, alternatively, a population of RNA or RNA mimics. The solid phase may be a nonporous or, optionally, a porous material such as a gel. In one embodiment, the microarray comprises a support or surface with an ordered array of binding (e.g., hybridization) sites or “probes” each representing one of the biomarkers described herein. Preferably the microarrays are addressable arrays, and more preferably positionally addressable arrays. More specifically, each probe of the array is preferably located at a known, predetermined position on the solid support such that the identity (i.e., the sequence) of each probe can be determined from its position in the array (i.e., on the support or surface). Each probe is preferably covalently attached to the solid support at a single site. Microarrays can be made in a number of ways, of which several are described below. However they are produced, microarrays share certain characteristics. The arrays are reproducible, allowing multiple copies of a given array to be produced and easily compared with each other. Preferably, microarrays are made from materials that are stable under binding (e.g., nucleic acid hybridization) conditions. Microarrays are generally small, e.g., between 1 cm2 and 25 cm2; however, larger arrays may also be used, e.g., in screening arrays. Preferably, a given binding site or unique set of binding sites in the microarray will specifically bind (e.g., hybridize) to the product of a single gene in a cell (e.g., to a specific mRNA, or to a specific cDNA derived therefrom). However, in general, other related or similar sequences will cross hybridize to a given binding site.

[0183] As noted above, the “probe” to which a particular polynucleotide molecule specifically hybridizes contains a complementary polynucleotide sequence. The probes of the microarray typically consist of nucleotide sequences of no more than 1,000 nucleotides. In some embodiments, the probes of the array consist of nucleotide sequences of 10 to 1,000 nucleotides. In one aspect, the nucleotide sequences of the probes are in the range of 10-200 nucleotides in length and are genomic sequences of one species of organism, such that a plurality of different probes is present, with sequences complementary and thus capable of hybridizing to the genome of such a species of organism, sequentially tiled across all or a portion of the genome. In other aspects, the probes are in the range of 10-30 nucleotides in length, in the range of 10-40 nucleotides in length, in the range of 20-50 nucleotides in length, in the range of 40-80 nucleotides in length, in the range of 50-150 nucleotides in length, in the range of 80-120 nucleotides in length, or are 60 nucleotides in length. The probes may comprise DNA or DNA “mimics” (e.g., derivatives and analogues) corresponding to a portion of an organism's genome. In another aspect, the probes of the microarray are complementary RNA or RNA mimics. DNA mimics are polymers composed of subunits capable of specific, Watson-Crick-like hybridization with DNA, or of specific hybridization with RNA. The nucleic acids can be modified at the base moiety, at the sugar moiety, or at the phosphate backbone (e.g., phosphorothioates).

[0184] DNA can be obtained, e.g., by polymerase chain reaction (PCR) amplification of genomic DNA or cloned sequences. PCR primers are preferably chosen based on a known sequence of the genome that will result in amplification of specific fragments of genomic DNA. Computer programs that are well known in the art are useful in the design of primers with the required specificity and optimal amplification properties, such as Oligo version 5.0 (National Biosciences). Typically, each probe on the microarray will be between 10 bases and 50,000 bases, usually between 300 bases and 1,000 bases in length. PCR methods are well known in the art, and are described, for example, in Innis et al., eds., PCR Protocols: A Guide To Methods And Applications, Academic Press Inc., San Diego, Calif. (1990); herein incorporated by reference in its entirety. It will be apparent to one skilled in the art that controlled robotic systems are useful for isolating and amplifying nucleic acids. An alternative, preferred means for generating polynucleotide probes is by synthesis of synthetic polynucleotides or oligonucleotides, e.g., using N-phosphonate or phosphoramidite chemistries (Froehler et al., Nucleic Acid Res. 14:5399-5407 (1986); McBride et al., Tetrahedron Lett. 24:246-248 (1983)). Synthetic sequences are typically between about 10 and about 500 bases in length, more typically between about 20 and about 100 bases, and most preferably between about 40 and about 70 bases in length. In some embodiments, synthetic nucleic acids include non-natural bases, such as, but by no means limited to, inosine. As noted above, nucleic acid analogues may be used as binding sites for hybridization. An example of a suitable nucleic acid analogue is peptide nucleic acid (see, e.g., U.S. Pat. No. 5,539,083).

[0185] Probes are preferably selected using an algorithm that takes into account binding energies, base composition, sequence complexity, cross-hybridization binding energies, and secondary structure.

[0186] A skilled artisan will also appreciate that positive control probes, e.g., probes known to be complementary and hybridizable to sequences in the target polynucleotide molecules, and negative control probes, e.g., probes known to not be complementary and hybridizable to sequences in the target polynucleotide molecules, should be included on the array. In one embodiment, positive controls are synthesized along the perimeter of the array. In another embodiment, positive controls are synthesized in diagonal stripes across the array. In still another embodiment, the reverse complement for each probe is synthesized next to the position of the probe to serve as a negative control. In yet another embodiment, sequences from other species of organism are used as negative controls or as “spike-in” controls.

[0187] The probes are attached to a solid support or surface, which may be made, e.g., from glass, plastic (e.g., polypropylene, nylon), polyacrylamide, nitrocellulose, gel, or other porous or nonporous material. One method for attaching nucleic acids to a surface is by printing on glass plates, as known in the art. This method is especially useful for preparing microarrays of cDNA. A second method for making microarrays produces high-density oligonucleotide arrays. Techniques are known for producing arrays containing thousands of oligonucleotides complementary to defined sequences, at defined locations on a surface using photolithographic techniques for synthesis in situ (see, U.S. Pat. Nos. 5,578,832; 5,556,752; and 5,510,270; herein incorporated by reference in their entireties) or other methods for rapid synthesis and deposition of defined oligonucleotides. When these methods are used, oligonucleotides (e.g., 60-mers) of known sequence are synthesized directly on a surface such as a derivatized glass slide. Usually, the array produced is redundant, with several oligonucleotide molecules per RNA.

[0188] Other methods for making microarrays, e.g., by masking, may also be used. In principle, any type of array known in the art, for example, dot blots on a nylon hybridization membrane could be used. However, as will be recognized by those skilled in the art, very small arrays will frequently be preferred because hybridization volumes will be smaller.

[0189] Microarrays can also be manufactured by means of an ink jet printing device for oligonucleotide synthesis, e.g., using the methods and systems described by Blanchard in U.S. Pat. No. 6,028,189. Specifically, the oligonucleotide probes in such microarrays are synthesized in arrays, e.g., on a glass slide, by serially depositing individual nucleotide bases in “microdroplets” of a high surface tension solvent such as propylene carbonate. The microdroplets have small volumes (e.g., 100 pL or less, more preferably 50 pL or less) and are separated from each other on the microarray (e.g., by hydrophobic domains) to form circular surface tension wells which define the locations of the array elements (i.e., the different probes). Microarrays manufactured by this ink jet method are typically of high density, preferably having a density of at least about 2,500 different probes per 1 cm2. The polynucleotide probes are attached to the support covalently at either the 3′ or the 5′ end of the polynucleotide.

[0190] KZFP polynucleotides which may be measured by microarray analysis can be expressed mRNAs or a nucleic acid derived therefrom (e.g., cDNA or amplified RNA derived from cDNA that incorporates an RNA polymerase promoter), including naturally occurring nucleic acid molecules, as well as synthetic nucleic acid molecules. In one embodiment, the target polynucleotide molecules comprise RNA, including, but by no means limited to, total cellular RNA, poly(A)+ messenger RNA (mRNA) or a fraction thereof, cytoplasmic mRNA, or RNA transcribed from cDNA (i.e., cRNA; see, e.g., U.S. Pat. Nos. 5,545,522, 5,891,636, or 5,716,785). Methods for preparing total and poly(A)+ RNA are well known in the art, and are described generally, e.g., in Sambrook, et al., Molecular Cloning: A Laboratory Manual (3rd Edition, 2001). RNA can be extracted from a cell of interest using guanidinium thiocyanate lysis followed by CsCl centrifugation, a silica gel-based column (e.g., RNeasy (Qiagen, Valencia, Calif.) or StrataPrep (Stratagene, La Jolla, Calif.)), or using phenol and chloroform, as known in the art. Poly(A)+ RNA can be selected, e.g., by selection with oligo-dT cellulose or, alternatively, by oligo-dT primed reverse transcription of total cellular RNA. RNA can be fragmented by methods known in the art, e.g., by incubation with ZnC12, to generate fragments of RNA.

[0191] In one aspect, total RNA, mRNAs, or nucleic acids derived therefrom (such as cDNA), are isolated from a sample taken from a patient having cancer or a cancer tissue undergoing surgical and/or pharmacological therapies. KZFPs of the invention that are poorly expressed in particular cells may be enriched using normalization techniques known in the art. As described above, the KZFP polynucleotides can be detectably labeled at one or more nucleotides. Any method known in the art may be used to label the target polynucleotides. Preferably, this labeling incorporates the label uniformly along the length of the RNA, and more preferably, the labeling is carried out at a high degree of efficiency. For example, polynucleotides can be labeled by oligo-dT primed reverse transcription. Random primers (e.g., 9-mers) can be used in reverse transcription to uniformly incorporate labeled nucleotides over the full length of the polynucleotides. Alternatively, random primers may be used in conjunction with PCR methods or T7 promoter-based in vitro transcription methods in order to amplify polynucleotides.

[0192] The detectable label may be a luminescent label. For example, fluorescent labels, bioluminescent labels, chemiluminescent labels, and colorimetric labels may be used in the practice of the invention. Fluorescent labels that can be used include, but are not limited to, fluorescein, a phosphor, a rhodamine, or a polymethine dye derivative. Additionally, commercially available fluorescent labels including, but not limited to, fluorescent phosphoramidites such as FluorePrime (Amersham Pharmacia, Piscataway, N.J.), Fluoredite (Miilipore, Bedford, Mass.), FAM (ABI, Foster City, Calif.), and Cy3 or Cy5 (Amersham Pharmacia, Piscataway, N.J.) can be used. Alternatively, the detectable label can be a radiolabeled nucleotide.

[0193] In one aspect, KZFP polynucleotide molecules from a patient sample are labeled differentially from the corresponding polynucleotide molecules of a reference sample. The reference can comprise mRNAs from a normal biological sample (i.e., control sample, e.g., biopsy from a subject not having a cancer or a cancer tissue undergoing surgical and/or pharmacological therapies) or from a reference biological sample, (e.g., sample from a subject not having a cancer or a cancer tissue undergoing surgical and/or pharmacological therapies).

[0194] Nucleic acid hybridization and wash conditions are chosen so that the target polynucleotide molecules specifically bind or specifically hybridize to the complementary polynucleotide sequences of the array, preferably to a specific array site, wherein its complementary DNA is located. Arrays containing double-stranded probe DNA situated thereon are preferably subjected to denaturing conditions to render the DNA single-stranded prior to contacting with the target polynucleotide molecules. Arrays containing single-stranded probe DNA (e.g., synthetic oligodeoxyribonucleic acids) may need to be denatured prior to contacting with the target polynucleotide molecules, e.g., to remove hairpins or dimers which form due to self-complementary sequences.

[0195] Optimal hybridization conditions will depend on the length (e.g., oligomer versus polynucleotide greater than 200 bases) and type (e.g., RNA, or DNA) of probe and target nucleic acids. One of skill in the art will appreciate that as the oligonucleotides become shorter, it may become necessary to adjust their length to achieve a relatively uniform melting temperature for satisfactory hybridization results. General parameters for specific (i.e., stringent) hybridization conditions for nucleic acids are described in Sambrook, et al., Molecular Cloning: A Laboratory Manual (3rd Edition, 2001). Typical hybridization conditions for the cDNA microarrays of Schena et al. are hybridization in 5×SSC plus 0.2% SDS at 65° C. for four hours, followed by washes at 25° C. in low stringency wash buffer (1×SSC plus 0.2% SDS), followed by 10 minutes at 25° C. in higher stringency wash buffer (0.1×SSC plus 0.2% SDS). Particularly preferred hybridization conditions include hybridization at a temperature at or near the mean melting temperature of the probes (e.g., within 51º C., more preferably within 21° C.) in 1 M NaCl, 50 mM MES buffer (pH 6.5), 0.5% sodium sarcosine and 30% formamide.

[0196] When fluorescently labeled gene products are used, the fluorescence emissions at each site of a microarray may be, preferably, detected by scanning confocal laser microscopy. In one embodiment, a separate scan, using the appropriate excitation line, is carried out for each of the two fluorophores used. Alternatively, a laser may be used that allows simultaneous specimen illumination at wavelengths specific to the two fluorophores and emissions from the two fluorophores can be analyzed simultaneously. Arrays can be scanned with a laser fluorescent scanner with a computer controlled X-Y stage and a microscope objective. Sequential excitation of the two fluorophores is achieved with a multi-line, mixed gas laser and the emitted light is split by wavelength and detected with two photomultiplier tubes. Fluorescence laser scanning devices are known in the art. Alternatively, a fiber-optic bundle, may be used to monitor RNA, mRNA, DNA or cDNA abundance levels at a large number of sites simultaneously.

[0197] As used herein, the wording “differential transcription and/or expression and/or activity of one or more KZFP” and their synonyms, which are used interchangeably, refer to one or more KZFP gene(s) or KZFP gene product(s) (e.g. transcripts or proteins) whose transcription and/or expression and/or activity is/are activated to a higher or lower level in a subject suffering from a disease, specifically cancer, relative to its/their transcription and/or expression and/or activity in a normal or control subject, or reference data. The terms also include KZFP genes or gene products whose transcription and/or expression and/or activity is altered to a higher or lower level at different stages of the same disease. It is also understood that a differentially transcripted and/or expressed gene may be either activated or inhibited at the nucleic acid level or protein level, or may be subject to alternative splicing to result in a different polypeptide product. Such differences may be evidenced by a change in mRNA levels, surface expression, secretion or other partitioning of a polypeptide, for example.

[0198] Differential gene transcription and/or expression and/or activity may include a comparison of transcription and/or expression and/or activity between two or more KZFP genes or their gene products, or a comparison of the ratios of the transcription and/or expression and/or activity between two or more KZFP genes or their gene products, or even a comparison of two differently processed products of the same KZFP gene, which differ between normal subjects and subjects suffering from a disease, specifically cancer, or between various stages of the same disease. In particular, the reference (“control”) transcription and/or expression and/or activity level can be the transcription and/or expression and/or activity level of the KZFP gene product in a control sample. The control sample can be a normal sample, that is, a non-tumoural sample, preferably from the same tissue than the cancer sample, or a basal level of transcription and/or expression and/or activity.

[0199] The normal sample may be obtained from the subject affected with the cancer or from another subject, such as a normal or healthy subject, i.e. a subject who does not suffer from a cancer. Additionally, or alternatively, the control sample can be obtained from data repositories of cancer patient expression studies; accordingly, the control sample could be in this case a virtual sample obtained from such a data repository for a given cancer type.

[0200] Transcription and/or expression and/or activity levels obtained from cancer and normal samples may be normalized by using e.g. expression levels of proteins which are known to have stable expression such as RPLPO (acidic ribosomal phosphoprotein PO), TBP (TATA box binding protein), GAPDH (glyceraldehyde 3-phosphate dehydrogenase) or b-actin. Additionally, or alternatively, as it will be appreciated by a person skilled in the art, it is possible to use statistical methods based on whole-transcriptome expression distribution for normalization of cancer and control/normal samples.

[0201] Differential transcription and/or expression and/or activity includes both quantitative, as well as qualitative, differences in the temporal or cellular transcription and/or expression and/or activity pattern in a gene or its products among, for example, normal and diseased cells, or among cells which have undergone different disease events or disease stages. For the purpose of this description, “differential gene transcription and/or expression and/or activity” is considered to be present when there is at least a two-fold difference between the transcription and/or expression and/or activity of a given gene or gene product in normal and diseased subjects, or in various stages of disease development in a diseased subject.

[0202] In an aspect of the invention, the differential gene transcription and/or expression and/or activity of one or more KZFP corresponds to an upregulated expression, transcription and/or activity of said one or more KZFP.

[0203] Usually, the upregulated expression, transcription and/or activity of said one or more KZFP in a biological sample corresponds to an increase equal or superior to about 5%, preferably equal or superior to about 20%, more preferably equal or superior to about 40%, most preferably equal or superior to about 60%, more preferably equal or superior to about 500%, even more preferably equal or superior to about 1000%, in particular equal or superior to about 5000% when compared to the level of corresponding said one or more KZFP in a control biological sample of a cancer-free subject.

[0204] The biological sample is selected, in the context of the present application, from the group comprising whole blood, serum, plasma, semen, saliva, tears, urine, fecal material, sweat, buccal smears, skin, and cancer cells, or a combination of one or more of these biological samples.

[0205] The present invention also encompasses a method of stratifying a cancer in a subject comprising:
[0206] (a) detecting, directly or indirectly, and measuring the level of transcription and/or expression and/or activity of one or more KZFP in a sample obtained from said subject;
[0207] (b) comparing the level of transcription and/or expression and/or activity of said one or more KZFP to a control biological sample for the same one or more KZFP;
[0208] wherein an alteration in the transcription and/or expression and/or activity level of one or more one or more KZFP in said biological sample, relative to the level of corresponding said one or more KZFP in a control biological sample of a cancer-free subject, is indicative of the disease stage or grade.

[0209] In one aspect, the combination of one or more KZFP will comprise a combination of two or more, three or more, four or more, five or more, six or more, seven or more, ten or more, fifteen or more, twenty or more, twenty-five or more, thirty or more, forty or more, fifty or more, sixty or more, seventy or more, eighty or more, ninety or more, one hundred or more, or the complete set of the 110 KZFPs.

[0210] In one aspect, the KZFP will be selected from the group comprising ZNF200, ZNF671, ZNF586, ZNF343, ZNF473, ZNF614, ZNF7, ZNF547, ZNF773, ZNF776, ZKSCAN2, ZNF761, ZNF577, ZNF160, ZNF584, ZNF417, ZNF543, ZNF713, ZNF552, ZFP82, ZNF320, ZNF749, ZNF17, ZNF567, ZNF766, ZNF765, ZNF252P, ZNF420, ZNF615, ZNF121, ZNF544, ZNF583, ZNF587, ZNF814, ZNF805, ZNF134, ZNF850, and ZNF587B, or a combination of one or more thereof, e.g. two or more, three or more, four or more, five or more, six or more, seven or more, ten or more, fifteen or more, twenty or more, or the complete set of the 38 KZFPs.

[0211] In a preferred aspect, the KZFP will be selected from the group comprising ZNF107, ZNF121, ZNF200, ZNF239, ZNF473, ZNF547, ZNF558, ZNF587, ZNF695, ZNF7, ZNF700, ZNF749, ZNF766, ZNF783, ZNF789, ZNF814, ZNF841, ZNF8-ERVK3-1 and ZNF850, or a combination of one or more thereof, e.g. two or more, three or more, four or more, five or more, six or more, seven or more, ten or more, fifteen or more, or the complete set of the 19 KZFPs.

[0212] In a more preferred aspect, the KZFP will be selected from the group comprising ZNF121, ZNF200, ZNF473, ZNF547, ZNF587, ZNF7, ZNF749, ZNF766, ZNF814, and ZNF850, or a combination of one or more thereof, e.g. two or more, three or more, four or more, five or more, six or more, seven or more, nine or more, or the complete set of the 10 KZFPs.

[0213] Also encompassed is a method of determining the progression or regression, of a cancer in a subject suffering therefrom, said method comprising:
[0214] (a) detecting, directly or indirectly, and measuring the level of transcription and/or expression and/or activity of one or more KZFP in a sample obtained from said subject;
[0215] (b) periodically comparing the level of transcription and/or expression and/or activity of said one or more KZFP,
[0216] wherein an alteration in the level of transcription and/or expression and/or activity of one or more KZFP in a sample obtained from the same subject, relative to the level of transcription and/or expression and/or activity of one or more KZFP, determined previously, is indicative of the progression or regression of said cancer.

[0217] In an aspect of the invention, when the alteration in the transcription and/or expression and/or activity level(s) of one or more one or more KZFP corresponds to an enhanced transcription and/or expression and/or activity of said one or more KZFP, then this is indicative of the progression of said cancer.

[0218] In the same aspect of the invention, when the alteration in the transcription and/or expression and/or activity level(s) of one or more one or more KZFP corresponds to a decreased transcription and/or expression and/or activity of said one or more KZFP, then this is indicative of the regression of said cancer.

[0219] Alternatively, this method can also be used to determine the response to a cancer therapy. In this aspect of the invention, when the alteration in the transcription and/or expression and/or activity level of one or more one or more KZFP corresponds to an enhanced transcription and/or expression and/or activity of said one or more KZFP, then this is indicative that the cancer does not respond to said cancer therapy.

[0220] In case the subject suffering from cancer is determined to respond to the cancer therapy, the treatment is continued. Usually, the patient is predicted to respond when the level of corresponding transcription and/or expression and/or activity level of said one or more KZFP is downregulated.

[0221] In case the subject suffering from cancer is determined not to respond to the cancer therapy, the method further comprises a step of adapting the treatment. Usually, the patient is predicted not to respond when the level of corresponding transcription and/or expression and/or activity level of said one or more KZFP is upregulated or not significantly different to the level of the said one or more KZFP determined previously.

[0222] In one aspect, the step of adapting the treatment comprises not administering the envisioned treatment described herein, switching to another treatment, and/or adapting the dose of the treatment described herein.

[0223] These steps of continuing or adapting the cancer treatment are well within the skills and capacities of the medical doctors and medical staffs in charge of the follow-up of the treatment of the subject suffering from cancer.

[0224] In one aspect, the combination of one or more KZFP will comprise a combination of two or more, three or more, four or more, five or more, six or more, seven or more, ten or more, fifteen or more, twenty or more, twenty-five or more, thirty or more, forty or more, fifty or more, sixty or more, seventy or more, eighty or more, ninety or more, one hundred or more, or the complete set of the 110 KZFPs.

[0225] In one aspect, the KZFP will be selected from the group comprising ZNF200, ZNF671, ZNF586, ZNF343, ZNF473, ZNF614, ZNF7, ZNF547, ZNF773, ZNF776, ZKSCAN2, ZNF761, ZNF577, ZNF160, ZNF584, ZNF417, ZNF543, ZNF713, ZNF552, ZFP82, ZNF320, ZNF749, ZNF17, ZNF567, ZNF766, ZNF765, ZNF252P, ZNF420, ZNF615, ZNF121, ZNF544, ZNF583, ZNF587, ZNF814, ZNF805, ZNF134, ZNF850, and ZNF587B, or a combination of one or more thereof, e.g. two or more, three or more, four or more, five or more, six or more, seven or more, ten or more, fifteen or more, twenty or more, or the complete set of the 38 KZFPs.

[0226] In a preferred aspect, the KZFP will be selected from the group comprising ZNF107, ZNF121, ZNF200, ZNF239, ZNF473, ZNF547, ZNF558, ZNF587, ZNF695, ZNF7, ZNF700, ZNF749, ZNF766, ZNF783, ZNF789, ZNF814, ZNF841, ZNF8-ERVK3-1 and ZNF850, or a combination of one or more thereof, e.g. two or more, three or more, four or more, five or more, six or more, seven or more, ten or more, fifteen or more, or the complete set of the 19 KZFPs.

[0227] In a more preferred aspect, the KZFP will be selected from the group comprising ZNF121, ZNF200, ZNF473, ZNF547, ZNF587, ZNF7, ZNF749, ZNF766, ZNF814, and ZNF850, or a combination of one or more thereof, e.g. two or more, three or more, four or more, five or more, six or more, seven or more, nine or more, or the complete set of the 10 KZFPs.

[0228] Also encompassed is a method for classifying a cancer subject, the method comprising
[0229] (a) detecting, directly or indirectly, and measuring the level of transcription and/or expression and/or activity of one or more KZFP in a biological sample obtained from said subject, wherein said one or more KZFP is selected from the group listed in Table 1, or a variant or fragment thereof, and
[0230] (b) classifying the cancer subject as having a poor prognosis based on the presence and/or alteration of the transcription and/or expression and/or activity level(s) of the one or more KZFP in the biological sample.

[0231] The term “alteration” refers to a variation, either increase or decrease of said transcription and/or expression and/or activity level(s) when compared to a reference value (or reference range) or with the transcription and/or expression and/or activity level(s) determined previously, e.g. on the same cancer subject. Preferably, this alteration or variation is statistically significant.

[0232] As used herein, the term “poor prognosis” or “bad prognosis” refers to a patient or subject afflicted with cancer receiving or not a treatment that is likely to present metastasis, and/or that is likely to present cancer relapse, and/or that is likely to present short overall survival (OS), progression free survival (PFS) and/or metastasis.

[0233] In one aspect, the cancer subject is determined as having a poor prognosis when an alteration of the transcription and/or expression and/or activity level(s) of one or more KZFP, variant or fragment thereof, selected from the group comprising ZNF671, ZNF776, ZNF586, ZNF552, ZNF587B, ZNF417, ZNF107, ZNF121, ZNF200, ZNF239, ZNF473, ZNF547, ZNF558, ZNF587, ZNF695, ZNF7, ZNF700, ZNF749, ZNF766, ZNF783, ZNF789, ZNF814, ZNF841, and ZNF850, is detected and/or measured.

[0234] In a preferred aspect, the cancer subject is determined as having a poor prognosis when an alteration of the transcription and/or expression and/or activity level(s) of one or more KZFP, variant or fragment thereof, selected from the group comprising ZNF107, ZNF121, ZNF200, ZNF239, ZNF473, ZNF547, ZNF558, ZNF587, ZNF695, ZNF7, ZNF700, ZNF749, ZNF766, ZNF783, ZNF789, ZNF814, ZNF841, ZNF8-ERVK3-1 and ZNF850 is detected and/or measured.

[0235] In a more preferred aspect, the cancer subject is determined as having a poor prognosis when an alteration of the transcription and/or expression and/or activity level(s) of one or more KZFP, variant or fragment thereof, selected from the group comprising ZNF121, ZNF200, ZNF473, ZNF547, ZNF587, ZNF7, ZNF749, ZNF766, ZNF814, and ZNF850 is detected and/or measured.

[0236] Preferably, the alteration is an upregulated transcription, and/or upregulated expression and/or upregulated activity level(s) of one or more KZFP, variant or fragment thereof of Table 1.

[0237] In one aspect, the cancer subject is determined as having a poor prognosis when said one or more detected KZFP, variant or fragment thereof, is present in Table 1.

[0238] In one aspect, the cancer subject is determined as having a poor prognosis when the transcription and/or expression and/or activity level(s) of one or more KZFP, variant or fragment thereof of Table 1 is upregulated.

[0239] In one aspect, the cancer subject is suffering from lymphoma and is determined as having a poor prognosis when the transcription and/or expression and/or activity level(s) of one or more KZFP selected from the group comprising ZNF200, ZNF671, ZNF586, ZNF343, ZNF473, ZNF614, ZNF7, ZNF547, ZNF773, ZNF776, ZKSCAN2, ZNF761, ZNF577, ZNF160, ZNF584, ZNF417, ZNF543, ZNF713, ZNF552, ZFP82, ZNF320, ZNF749, ZNF17, ZNF567, ZNF766, ZNF765, ZNF252P, ZNF420, ZNF615, ZNF121, ZNF544, ZNF583, ZNF587, ZNF814, ZNF805, ZNF134, ZNF850, and ZNF587B, variant or fragment thereof, is upregulated.

[0240] In a preferred aspect, the cancer subject is suffering from lymphoma and is determined as having a poor prognosis when the transcription and/or expression and/or activity level(s) of one or more KZFP selected from the group comprising ZNF121, ZNF200, ZNF473, ZNF547, ZNF587, ZNF7, ZNF749, ZNF766, ZNF814, and ZNF850, variant or fragment thereof, is upregulated.

[0241] Also provided is a kit for performing a method according to the invention of for use in the treatment of cancer, said kit comprising
[0242] (a) one or more agents and/or pharmaceutical compositions, and
[0243] (b) instructions for use.

[0244] In some aspects, the kit comprises, alternatively or additionally, one or more oligonucleotide probes or primers specific to one or more target sequences within an mRNA encoding a KZFP, or a combination of KZFP, (i.e., oligonucleotide probes comprising a sequence complementary to a region of the KZFP of interest) selected from any of SEQ ID Nos of Table 1.

[0245] In some aspects, the kit comprises, alternatively or additionally, one or more oligonucleotide probes specific to one or more target sequences within an mRNA encoding a KZFP, or a combination of KZFP selected from the group comprising ZNF107, ZNF121, ZNF200, ZNF239, ZNF473, ZNF547, ZNF558, ZNF587, ZNF695, ZNF7, ZNF700, ZNF749, ZNF766, ZNF783, ZNF789, ZNF814, ZNF841, ZNF8-ERVK3-1 and ZNF850, a variant or a fragment thereof.

[0246] In some aspects, the kit comprises, alternatively or additionally, one or more oligonucleotide probes specific to one or more target sequences within an mRNA encoding a KZFP, or a combination of KZFP selected from the group comprising ZNF121, ZNF200, ZNF473, ZNF547, ZNF587, ZNF7, ZNF749, ZNF766, ZNF814, and ZNF850, a variant or a fragment thereof.

[0247] The disclosure is further illustrated by the following examples. The examples below are non-limiting and are merely representative of various aspects of the disclosure.

[0248] Also provided is one or more oligonucleotide probes or primers specific to one or more target sequences within an mRNA encoding a KZFP, or a combination of KZFP, (i.e., oligonucleotide probes comprising a sequence complementary to a region of the KZFP of interest) selected from any of SEQ ID Nos of Table 1. Preferably, the one or more oligonucleotide probes is/are specific to one or more target sequences within an mRNA encoding a KZFP, or a combination of KZFP selected from the group comprising ZNF107, ZNF121, ZNF200, ZNF239, ZNF473, ZNF547, ZNF558, ZNF587, ZNF695, ZNF7, ZNF700, ZNF749, ZNF766, ZNF783, ZNF789, ZNF814, ZNF841, ZNF8-ERVK3-1 and ZNF850, a variant or a fragment thereof. Most preferably, the one or more oligonucleotide probes is/are specific to one or more target sequences within an mRNA encoding a KZFP, or a combination of KZFP selected from the group comprising ZNF121, ZNF200, ZNF473, ZNF547, ZNF587, ZNF7, ZNF749, ZNF766, ZNF814, and ZNF850, a variant or a fragment thereof.

### EXAMPLES

### Example 1

### Primary Tumors Data

[0249] The RNA-seq dataset analyzed here has been granted access by the development assistance committee (DAC) of the University of Duke and accessed through The European Genome-phenome Archive (EGA) at the European Bioinformatics Institute. It includes RNA-seq data from 775 DLBCL samples sequenced on Illumina Hiseq 2500 platform generating 125 PE length reads with an average of 10 million reads per sample. The paired metadata used for survival analysis was extracted from the supplementary data of the study published by Reddy et al. Genetic and Functional Drivers of Diffuse Large B Cell Lymphoma. Reddy, Anupama et al. “Genetic and Functional Drivers of Diffuse Large B Cell Lymphoma.” Cell vol. 171, 2 (2017): 481-494.e15. doi:10.1016/j.cell.2017.09.027

### RNA-Seq Analysis

[0250] RNA-Seq bam files of the 775 DLBCL samples were downloaded from the EGA under the accession number EGAS00001002606. Read summarization on genes were generated using featureCounts with parameters -s 2 -t exon -g gene_id -Q 10. Sequencing depth normalization was performed using the TMM method as implemented in the voom function from the R package LIMMA from Bioconductor. One-hundred and forty-two samples with low coverage due to potential artefacts were omitted. The genes with an average expression<1 counts per million (CPM) across samples were filtered.

### RNA Extraction, Quantification, and Sequencing

[0251] Duplicates from two independent experiments were collected per sample. Total RNA was extracted with NucleoSpin RNA Plus (Macherey-Nagel) with an on-column deoxyribonuclease treatment. The sequencing libraries were generated using the TruSeq stranded mRNA sample preparation kit from Illumina. Libraries were then sequenced using the Illumina Hi-Seq technology with stranded 75-base single or paired-end reads. RNA-seq reads were mapped to the human genome (hg19) using HISAT2 (v2.1.0). Reads that were not uniquely mapped were discarded from the analysis using bamtools filter v2.4.1 with parameters -tag “NH: 1”.

### RNA-Seq Analysis

[0252] RNA-Seq bam files of the 775 DLBCL samples were downloaded from the EGA under the accession number EGAS00001002606. Read summarization on genes were generated using feature Counts with parameters -s 2 -t exon -g gene_id -Q 10. Sequencing depth normalization was performed using the TMM method as implemented in the voom function from the R package LIMMA from Bioconductor. One-hundred and forty-two samples with low coverage due to potential artefacts were omitted. The genes with an average expression<1 counts per million (CPM) across samples were filtered.

[0253] Gene-set enrichment analysis from differentially expressed genes in the KD experiments were performed using the Metascape webtool (www.metascape.org).

### Cell Culture

[0254] OCI-Ly7 and U2932 human lymphoma cell lines were obtained from DSMZ—German Collection of Microorganisms and Cell Cultures, Braunschweig, Germany (www.dsmz.de). The other cell lines used were obtained from ATCC collection, namely SU-DHL-4 (CRL-2957 ™) HL60 (CCL-240™), LoVo (CCL-229 ™), HCT116 (CCL-247 ™), HT-29 (HTB-38 ™)293T (CRL-11268 ™), K562 (CCL-243 ™). HBL-1 were obtained from ABM (CAT No T8204). All lymphoma cell lines were grown in RPMI 1640 (Gibco®) containing 10-20% fetal calf serum (FCS) and 1% penicillin, with the exception of OCI-Ly7 which were grown in IMDM containing 20% FCS and 1% penicillin. All cell lines were cultured at 37° C. and 5% CO₂. Cells were transduced, selected with 2-3 ug/mL puromycin and collected after 6 days for RNA-sequencing.

### Plasmids and Lentiviral Vectors

[0255] pLKO.puro shRNA vectors were used for ZNF586, ZNF587 and ZNF417 knock downs. The hairpin sequences against ZNF417/587 (GCAGCATATTGGAGAGAAATT—SEQ ID No 243; AGTCGAAAGAGCAGCCTTATT—SEQ ID No. 244) were designed using the Genetic Perturbation Portal of the Broad Institute and inserted with Age I/Eco RI into pLKO.1.puro LV (TRCN0000018002; Sigma-Aldrich). The short hairpin RNAs (shRNAs) targeting the sequence ZNF586 (TRCN0000015373 and TRCN0000015376) were obtained from Sigma-Aldrich. Lentiviral vectors production protocols are detailed at http://tronolab.epfl.ch. The cell proliferation after LV transduction was determined using the 3-[4,5-dimethylthiazol-2-yl]-2,5-diphenyltetrazolium bromide (MTT) assay. The cells were transduced at a multiplicity of infection (MOI) of 20 in every experiment.

### Results

[0256] Diffuse large B cell lymphoma (DLBCL) is the most frequently diagnosed aggressive non-Hodgkin lymphoma (NHL). It comprises several histological variants, which can be grouped into three main molecular subtypes based on gene expression signatures: germinal center (GCB), activated B-cell (ABC) and unclassified (UNCL) DLBCL. The distinction between these three groups holds prognostic and therapeutic value, ABC DLBCL has a worse prognosis than its GCB or UNCL counterparts as it is more frequently refractory to first line standard treatments and prone to relapse. The standard of care for first-line therapy in DLBCL is the R-CHOP (rituximab, cyclophosphamide, doxorubicin, vincristine and prednisone) regimen. Research on drug resistance has so far mainly focused on genetic alterations, but recent data points to the role of epigenetic changes. For instance, anthracycline-resistance has been linked to silencing of the transcription factor SMAD1 by DNA methylation of its promoter, resulting in impaired activation of DNA damage response genes. Accordingly, inhibitors of DNA methylation, such as 5-azacytidine, are currently coupled with R-CHOP in some clinical trials. Although advances in therapy over the last 20 years have led to improvements in cancer survival, additional strategies are still urgently needed.

[0257] We used our transcriptome analytical pipeline on a cohort of 630 DCBL patients (FIG. 1). Out of 23,560 genes, 1,530 were significantly associated with survival. Amongst these, 41 encoded for KZFPs (dark dots), which were associated with an increased risk of death compared with other TFs and protein coding genes.

[0258] Of 39 KZFP genes associated with poor prognosis, 38 were upregulated in the ABC DCBL subtype, 82% of which located on the long arm of chromosome 19 (Chr19q), a region frequently amplified in forms of DLBCL associated with disease relapse.

[0259] ZNF586, ZNF587 and its paralog ZNF417 were amongst the most highly expressed genes of this region, along with 5 others KZFP genes (namely ZNF587B, ZNF814, ZNF552, ZNF776 and ZNF671) also associated to poor prognosis clustered over a 200 kb segment.

[0260] Gene-silencing experiments of ZNF586, ZNF587 and ZNF417, across a panel of DLBCL cell lines, demonstrated a stringent proliferation arrest phenotype, which was also noticed in leukemia and colon cancer cell lines.

[0261] These experiments also revealed that ZNF586, ZNF587 and ZNF417 depletion was able to trigger a necrotic form of cell death, the mechanisms of which is currently being investigated. Transcriptomic analysis of arrested cells revealed enrichments in pathways implicated in proteolysis, endoplasmic reticulum-associated protein degradation (ERAD), antigen processing, major histocompatibility complex (MCH) class I presentation and cytokine production, suggesting increased sensitivity to immune recognition and killing. Additionally, proteome analysis of cell supernatant detected the presence of CXCL10, a chemokine implicated in T-cell, NK cell and macrophage migration, also suggesting that maneuvers aimed at blocking the effect of the KZFPs might enhance anti-tumor immune responses.

[0262] Based on these results, ZNF586, ZNF587 and ZNF417, along with other members of their 200 kb cluster, are new potential targets for the treatment of aggressive non-Hodgkin lymphoma and other tumors.

### Example 2

[0263] A transcriptome-based univariate Cox proportional regression analysis was conducted to identify genes whose expression levels were associated with poor survival across 31 TCGA tumor types. This table contains the KZFP gene hits that were associated with a decrease in survival probability as defined by a positive score (hazard ratio coefficients) and a false-discovery rate (FDR)<0.05 for each tumor type.

| Name | cancer | n | HR | Pvalue | FDR | cancer | n | HR | Pvalue | FDR |
|---|---|---|---|---|---|---|---|---|---|---|
| ZNF695 | KIRP | 287 | 1.4 | 1.00E−04 | 0.004938 | KIRC | 529 | 1.2 | 7.00E−04 | 0.0020634 |
| ZNF558 | LGG | 510 | 1.6 | 0 | 0 | KICH | 64 | 5.4 | 0 | 0 |
| ZNF239 | LIHC | 370 | 1.4 | 0 | 0 | KIRP | 287 | 1.5 | 5.00E−04 | 0.0131667 |
| ZNF700 | LGG | 510 | 1.5 | 0 | 0 | KIRC | 529 | 1.4 | 0 | 0 |
| ZNF587 | LGG | 510 | 1.3 | 0.0061 | 0.01746 | KIRC | 529 | 1.3 | 0.001 | 0.0027431 |
| ZNF7 | KIRP | 287 | 1.5 | 0.0035 | 0.044597 | KIRC | 529 | 1.3 | 4.00E−04 | 0.0012742 |
| ZNF783 | KIRC | 529 | 1.4 | 0 | 0 | ACC | 79 | 1.8 | 0.0017 | 0.0373056 |
| ZNF107 | LGG | 510 | 1.2 | 0.0016 | 0.006257 | KIRC | 529 | 1.3 | 4.00E−04 | 0.0012742 |
| ZNF547 | LGG | 510 | 1.3 | 0.003 | 0.009958 | KIRC | 529 | 1.2 | 0.0253 | 0.0456324 |
| ZNF789 | LGG | 510 | 1.3 | 0.0021 | 0.007825 | KIRC | 529 | 1.3 | 4.00E−04 | 0.0012742 |
| ZNF841 | LGG | 510 | 1.3 | 0.0029 | 0.009958 | KIRC | 529 | 1.3 | 1.00E−04 | 0.0003873 |
| ZNF473 | LGG | 510 | 1.5 | 0 | 0 | MESO | 85 | 1.5 | 6.00E−04 | 0.0131667 |
| ZNF749 | LGG | 510 | 1.4 | 1.00E−04 | 0.000556 | MESO | 85 | 1.6 | 0.0019 | 0.0326304 |
| RBAK | LGG | 510 | 1.5 | 0 | 0 | NA | NA | NA | NA | NA |
| ZFP30 | LGG | 510 | 1.3 | 0.0066 | 0.018104 | NA | NA | NA | NA | NA |
| ZFP69B | LIHC | 370 | 1.5 | 0 | 0 | NA | NA | NA | NA | NA |
| ZNF121 | PRAD | 496 | 2.1 | 4.00E−04 | 0.0316 | NA | NA | NA | NA | NA |
| ZNF200 | LGG | 510 | 1.4 | 0 | 0 | NA | NA | NA | NA | NA |
| ZNF251 | KIRC | 529 | 1.4 | 0 | 0 | NA | NA | NA | NA | NA |
| ZNF282 | ACC | 79 | 2 | 2.00E−04 | 0.011286 | NA | NA | NA | NA | NA |
| ZNF283 | LGG | 510 | 1.4 | 4.00E−04 | 0.001881 | NA | NA | NA | NA | NA |
| ZNF337 | KIRC | 529 | 1.3 | 2.00E−04 | 0.000725 | NA | NA | NA | NA | NA |
| ZNF354A | KIRC | 529 | 1.2 | 0.0259 | 0.046502 | NA | NA | NA | NA | NA |
| ZNF419 | LGG | 510 | 1.2 | 0.013 | 0.033783 | NA | NA | NA | NA | NA |
| ZNF432 | LGG | 510 | 1.5 | 0 | 0 | NA | NA | NA | NA | NA |
| ZNF485 | LIHC | 370 | 1.4 | 3.00E−04 | 0.0395 | NA | NA | NA | NA | NA |
| ZNF496 | ACC | 79 | 2 | 0 | 0 | NA | NA | NA | NA | NA |
| ZNF514 | KIRC | 529 | 1.3 | 0.0031 | 0.007332 | NA | NA | NA | NA | NA |
| ZNP517 | KIRC | 529 | 1.3 | 7.00E−04 | 0.002063 | NA | NA | NA | NA | NA |
| ZNF525 | LGG | 510 | 1.5 | 0 | 0 | NA | NA | NA | NA | NA |
| ZNF530 | LGG | 510 | 1.6 | 0 | 0 | NA | NA | NA | NA | NA |
| ZNP550 | LGG | 510 | 1.3 | 0.003 | 0.009958 | NA | NA | NA | NA | NA |
| ZNF707 | KIRC | 529 | 1.3 | 2.00E−04 | 0.000725 | NA | NA | NA | NA | NA |
| ZNF746 | KIRC | 529 | 1.3 | 0 | 0 | NA | NA | NA | NA | NA |
| ZNF766 | LGG | 510 | 1.3 | 0.0031 | 0.010037 | NA | NA | NA | NA | NA |
| ZNF80 | KIRC | 529 | 1.2 | 0.0028 | 0.006785 | NA | NA | NA | NA | NA |
| ZNF814 | KIRC | 529 | 1.3 | 2.00E−04 | 0.000725 | NA | NA | NA | NA | NA |
| ZNF850 | LGG | 510 | 1.5 | 0 | 0 | NA | NA | NA | NA | NA |
| ZSCAN22 | LGG | 510 | 1.5 | 0 | 0 | NA | NA | NA | NA | NA |
| ZNF93 | KIRP | 287 | 1.4 | 0.0033 | 0.044597 | SKCM | 103 | 2.1 | 1.00E−04 | 0.0395 |
| ZNF18 | LGG | 510 | 1.3 | 0.0049 | 0.014553 | KIRC | 529 | 1.4 | 0 | 0 |
| ZNF202 | KIRC | 529 | 1.3 | 2.00E−04 | 0.000725 | ACC | 79 | 2 | 0 | 0 |
| ZNF117 | KICH | 64 | 3.2 | 0 | 0 | KIRC | 529 | 1.4 | 0 | 0 |
| ZNF600 | LGG | 510 | 1.7 | 0 | 0 | KIRC | 529 | 1.3 | 3.00E−04 | 0.0010042 |
| ZNF83 | LGG | 510 | 1.3 | 0.0012 | 0.004837 | KIRC | 529 | 1.4 | 0 | 0 |
| ZNF71 | LGG | 510 | 1.4 | 0 | 0 | MESO | 85 | 1.9 | 0 | 0 |
| ZNF101 | LGG | 510 | 1.5 | 0 | 0 | UVM | 80 | 1.7 | 0.0099 | 0.0420484 |
| ZNF267 | LGG | 510 | 1.4 | 2.00E−04 | 0.001039 | UVM | 80 | 1.7 | 0.0096 | 0.0416703 |
| ZNF480 | LGG | 510 | 1.6 | 0 | 0 | UVM | 80 | 1.9 | 0.0022 | 0.0125942 |
| HKR1 | LGG | 510 | 1.3 | 0.0039 | 0.011942 | NA | NA | NA | NA | NA |
| ZFP28 | LGG | 510 | 1.3 | 0.0022 | 0.008046 | NA | NA | NA | NA | NA |
| ZFP69 | KIRC | 529 | 1.2 | 0.0095 | 0.01975 | NA | NA | NA | NA | NA |
| ZIK1 | LGG | 510 | 1.4 | 1.00E−04 | 0.000556 | NA | NA | NA | NA | NA |
| ZKSCAN5 | KICH | 64 | 2.8 | 5.00E−04 | 0.0395 | NA | NA | NA | NA | NA |
| ZNF112 | LGG | 510 | 1.3 | 0.0085 | 0.02284 | NA | NA | NA | NA | NA |
| ZNF12 | LGG | 510 | 1.4 | 2.00E−04 | 0.001039 | NA | NA | NA | NA | NA |
| ZNF132 | LGG | 510 | 1.3 | 0.0029 | 0.009958 | NA | NA | NA | NA | NA |
| ZNF133 | KIRC | 529 | 1.3 | 3.00E−04 | 0.001004 | NA | NA | NA | NA | NA |
| ZNF134 | LGG | 510 | 1.4 | 0 | 0 | NA | NA | NA | NA | NA |
| ZNF136 | LGG | 510 | 1.3 | 0.0036 | 0.011376 | NA | NA | NA | NA | NA |
| ZNF137P | LGG | 510 | 1.4 | 1.00E−04 | 0.000556 | NA | NA | NA | NA | NA |
| ZNF155 | LGG | 510 | 1.4 | 1.00E−04 | 0.000556 | NA | NA | NA | NA | NA |
| ZNF160 | LGG | 510 | 1.3 | 0.0042 | 0.012664 | NA | NA | NA | NA | NA |
| ZNF17 | LGG | 510 | 1.3 | 0.0062 | 0.017493 | NA | NA | NA | NA | NA |
| ZNF175 | LGG | 510 | 1.2 | 0.0129 | 0.033745 | NA | NA | NA | NA | NA |
| ZNF180 | LGG | 510 | 1.5 | 0 | 0 | NA | NA | NA | NA | NA |
| ZNF20 | LGG | 510 | 1.4 | 1.00E−04 | 0.000556 | NA | NA | NA | NA | NA |
| ZNF211 | LGG | 510 | 1.4 | 0 | 0 | NA | NA | NA | NA | NA |
| ZNF214 | LGG | 510 | 1.3 | 0.0134 | 0.03437 | NA | NA | NA | NA | NA |
| ZNF221 | LGG | 510 | 1.2 | 0.0147 | 0.036984 | NA | NA | NA | NA | NA |
| ZNF224 | LGG | 510 | 1.5 | 0 | 0 | NA | NA | NA | NA | NA |
| ZNF227 | LGG | 510 | 1.2 | 0.0124 | 0.032653 | NA | NA | NA | NA | NA |
| ZNF229 | LGG | 510 | 1.3 | 0.0013 | 0.005187 | NA | NA | NA | NA | NA |
| ZNF230 | LGG | 510 | 1.5 | 0 | 0 | NA | NA | NA | NA | NA |
| ZNF235 | LGG | 510 | 1.4 | 1.00E−04 | 0.000556 | NA | NA | NA | NA | NA |
| ZNF248 | LIHC | 370 | 1.4 | 4.00E−04 | 0.0395 | NA | NA | NA | NA | NA |
| ZNF252P | UVM | 80 | 1.8 | 0.005 | 0.02487 | NA | NA | NA | NA | NA |
| ZNF256 | LGG | 510 | 1.2 | 0.0184 | 0.044048 | NA | NA | NA | NA | NA |
| ZNF260 | LGG | 510 | 1.3 | 0.003 | 0.009958 | NA | NA | NA | NA | NA |
| ZNF264 | LGG | 510 | 1.3 | 9.00E−04 | 0.003823 | NA | NA | NA | NA | NA |
| ZNF266 | KIRC | 529 | 1.3 | 9.00E−04 | 0.002539 | NA | NA | NA | NA | NA |
| ZNF268 | LGG | 510 | 1.3 | 0.002 | 0.007596 | NA | NA | NA | NA | NA |
| ZNF274 | PRAD | 496 | 2.8 | 0 | 0 | NA | NA | NA | NA | NA |
| ZNF28 | LGG | 510 | 1.6 | 0 | 0 | NA | NA | NA | NA | NA |
| ZNF300 | KIRC | 529 | 1.3 | 3.00E−04 | 0.001004 | NA | NA | NA | NA | NA |
| ZNF304 | LGG | 510 | 1.3 | 0.0039 | 0.011942 | NA | NA | NA | NA | NA |
| ZNF316 | CESC | 304 | 1.6 | 0 | 0 | NA | NA | NA | NA | NA |
| ZNF320 | LGG | 510 | 1.4 | 3.00E−04 | 0.0015 | NA | NA | NA | NA | NA |
| ZNF331 | LGG | 510 | 1.2 | 0.0202 | 0.047778 | NA | NA | NA | NA | NA |
| ZNF333 | KIRC | 529 | 1.2 | 0.0136 | 0.026726 | NA | NA | NA | NA | NA |
| ZNF334 | KIRC | 529 | 1.3 | 0.0012 | 0.003203 | NA | NA | NA | NA | NA |
| ZNF345 | LGG | 510 | 1.4 | 0 | 0 | NA | NA | NA | NA | NA |
| ZNF347 | LGG | 510 | 1.3 | 0 | 0 | NA | NA | NA | NA | NA |
| ZNF35 | LGG | 510 | 1.4 | 8.00E−04 | 0.003435 | NA | NA | NA | NA | NA |
| ZNF350 | LGG | 510 | 1.3 | 0.0036 | 0.011376 | NA | NA | NA | NA | NA |
| ZNF354B | KIRC | 529 | 1.2 | 0.0138 | 0.026985 | NA | NA | NA | NA | NA |
| ZNF37BP | KIRC | 529 | 1.3 | 4.00E−04 | 0.001274 | NA | NA | NA | NA | NA |
| ZNF383 | LGG | 510 | 1.3 | 0.001 | 0.004158 | NA | NA | NA | NA | NA |
| ZNF404 | KIRC | 529 | 1.3 | 0 | 0 | NA | NA | NA | NA | NA |
| ZNF416 | LGG | 510 | 1.4 | 1.00E−04 | 0.000556 | NA | NA | NA | NA | NA |
| ZNF417 | LGG | 510 | 1.4 | 3.00E−04 | 0.0015 | NA | NA | NA | NA | NA |
| ZNF418 | PRAD | 496 | 2.1 | 6.00E−04 | 0.0395 | NA | NA | NA | NA | NA |
| ZNF436 | LGG | 510 | 1.4 | 0 | 0 | NA | NA | NA | NA | NA |
| ZNF439 | PCPG | 178 | 2.8 | 0 | 0 | NA | NA | NA | NA | NA |
| ZNF44 | LGG | 510 | 1.3 | 0.0018 | 0.006971 | NA | NA | NA | NA | NA |
| ZNF440 | PCPG | 178 | 2.5 | 3.00E−04 | 0.0395 | NA | NA | NA | NA | NA |
| ZNF443 | LGG | 510 | 1.5 | 0 | 0 | NA | NA | NA | NA | NA |
| ZNF446 | KIRC | 529 | 1.3 | 0.0012 | 0.003203 | NA | NA | NA | NA | NA |
| ZNF45 | LGG | 510 | 1.6 | 0 | 0 | NA | NA | NA | NA | NA |
| ZNF460 | LGG | 510 | 1.2 | 0.0206 | 0.048435 | NA | NA | NA | NA | NA |
| ZNF461 | LGG | 510 | 1.4 | 4.00E−04 | 0.001881 | NA | NA | NA | NA | NA |
| ZNF468 | LGG | 510 | 1.2 | 0.0058 | 0.016723 | NA | NA | NA | NA | NA |
| ZNF470 | LGG | 510 | 1.6 | 0 | 0 | NA | NA | NA | NA | NA |
| ZNF471 | LGG | 510 | 1.2 | 0.0148 | 0.037 | NA | NA | NA | NA | NA |
| ZNF486 | LGG | 510 | 1.3 | 0.0028 | 0.009788 | NA | NA | NA | NA | NA |
| ZNF487 | KIRC | 529 | 1.3 | 1.00E−04 | 0.000387 | NA | NA | NA | NA | NA |
| ZNF497 | LGG | 510 | 1.3 | 0.0031 | 0.010037 | NA | NA | NA | NA | NA |
| ZNF527 | LGG | 510 | 1.3 | 0.001 | 0.004158 | NA | NA | NA | NA | NA |
| ZNF528 | LGG | 510 | 1.5 | 0 | 0 | NA | NA | NA | NA | NA |
| ZNF543 | LGG | 510 | 1.3 | 0.0083 | 0.022455 | NA | NA | NA | NA | NA |
| ZNF544 | LGG | 510 | 1.4 | 1.00E−04 | 0.000556 | NA | NA | NA | NA | NA |
| ZNF548 | LGG | 510 | 1.3 | 6.00E−04 | 0.002633 | NA | NA | NA | NA | NA |
| ZNF549 | LGG | 510 | 1.4 | 5.00E−04 | 0.00227 | NA | NA | NA | NA | NA |
| ZNF552 | LGG | 510 | 1.6 | 0 | 0 | NA | NA | NA | NA | NA |
| ZNF557 | LGG | 510 | 1.2 | 0.0174 | 0.042426 | NA | NA | NA | NA | NA |
| ZNF561 | LGG | 510 | 1.2 | 0.0134 | 0.03437 | NA | NA | NA | NA | NA |
| ZNF562 | KICH | 64 | 3.6 | 4.00E−04 | 0.0395 | NA | NA | NA | NA | NA |
| ZNF566 | LGG | 510 | 1.3 | 0.0031 | 0.010037 | NA | NA | NA | NA | NA |
| ZNF567 | LGG | 510 | 1.4 | 2.00E−04 | 0.001039 | NA | NA | NA | NA | NA |
| ZNF568 | LGG | 510 | 1.4 | 0 | 0 | NA | NA | NA | NA | NA |
| ZNF569 | LGG | 510 | 1.2 | 0.0163 | 0.039991 | NA | NA | NA | NA | NA |
| ZNF57 | PRAD | 496 | 3.5 | 2.00E−04 | 0.026333 | NA | NA | NA | NA | NA |
| ZNF570 | LGG | 510 | 1.3 | 0.003 | 0.009958 | NA | NA | NA | NA | NA |
| ZNF571 | LGG | 510 | 1.2 | 0.0209 | 0.048562 | NA | NA | NA | NA | NA |
| ZNF573 | LGG | 510 | 1.3 | 0.0038 | 0.011819 | NA | NA | NA | NA | NA |
| ZNF577 | LGG | 510 | 1.2 | 0.0158 | 0.039006 | NA | NA | NA | NA | NA |
| ZNF582 | LGG | 510 | 1.3 | 0.0015 | 0.005925 | NA | NA | NA | NA | NA |
| ZNF583 | LGG | 510 | 1.3 | 0.002 | 0.007596 | NA | NA | NA | NA | NA |
| ZNF584 | LGG | 510 | 1.3 | 0.0033 | 0.010598 | NA | NA | NA | NA | NA |
| ZNF585A | LGG | 510 | 1.3 | 0.0063 | 0.017649 | NA | NA | NA | NA | NA |
| ZNF585B | LGG | 510 | 1.4 | 0 | 0 | NA | NA | NA | NA | NA |
| ZNF586 | LGG | 510 | 1.4 | 4.00E−04 | 0.001881 | NA | NA | NA | NA | NA |
| ZNF599 | LGG | 510 | 1.4 | 0 | 0 | NA | NA | NA | NA | NA |
| ZNF605 | KIRC | 529 | 1.2 | 0.0047 | 0.010372 | NA | NA | NA | NA | NA |
| ZNF606 | LGG | 510 | 1.3 | 0.0054 | 0.015684 | NA | NA | NA | NA | NA |
| ZNF607 | LGG | 510 | 1.3 | 0.0051 | 0.014922 | NA | NA | NA | NA | NA |
| ZNF611 | LGG | 510 | 1.3 | 0.0011 | 0.004526 | NA | NA | NA | NA | NA |
| ZNF613 | LGG | 510 | 1.4 | 0 | 0 | NA | NA | NA | NA | NA |
| ZNF615 | LGG | 510 | 1.3 | 0.0062 | 0.017493 | NA | NA | NA | NA | NA |
| ZNF616 | LGG | 510 | 1.2 | 0.019 | 0.045211 | NA | NA | NA | NA | NA |
| ZNF655 | LGG | 510 | 1.5 | 0 | 0 | NA | NA | NA | NA | NA |
| ZNF662 | LGG | 510 | 1.4 | 1.00E−04 | 0.000556 | NA | NA | NA | NA | NA |
| ZNF665 | LGG | 510 | 1.3 | 0.0042 | 0.012664 | NA | NA | NA | NA | NA |
| ZNF680 | UVM | 80 | 1.8 | 0.0082 | 0.036393 | NA | NA | NA | NA | NA |
| ZNF682 | KIRC | 529 | 1.3 | 1.00E−04 | 0.000387 | NA | NA | NA | NA | NA |
| ZNF684 | LGG | 510 | 1.4 | 4.00E−04 | 0.001881 | NA | NA | NA | NA | NA |
| ZNF69 | LGG | 510 | 1.6 | 0 | 0 | NA | NA | NA | NA | NA |
| ZNF701 | LGG | 510 | 1.7 | 0 | 0 | NA | NA | NA | NA | NA |
| ZNF713 | LGG | 510 | 1.2 | 0.0093 | 0.024821 | NA | NA | NA | NA | NA |
| ZNF732 | KIRC | 529 | 1.2 | 0.0101 | 0.020671 | NA | NA | NA | NA | NA |
| ZNF737 | MESO | 85 | −2 | 0 | 0 | NA | NA | NA | NA | NA |
| ZNF75A | LGG | 510 | 1.3 | 0.0028 | 0.009788 | NA | NA | NA | NA | NA |
| ZNF761 | LGG | 510 | 1.6 | 0 | 0 | NA | NA | NA | NA | NA |
| ZNF765 | LGG | 510 | 1.6 | 0 | 0 | NA | NA | NA | NA | NA |
| ZNF77 | PCPG | 178 | 2.8 | 1.00E−04 | 0.01975 | NA | NA | NA | NA | NA |
| ZNF773 | LGG | 510 | 1.4 | 0 | 0 | NA | NA | NA | NA | NA |
| ZNF776 | LGG | 510 | 1.5 | 0 | 0 | NA | NA | NA | NA | NA |
| ZNF788 | LGG | 510 | 1.3 | 6.00E−04 | 0.002633 | NA | NA | NA | NA | NA |
| ZNF79 | PRAD | 496 | 2 | 2.00E−04 | 0.026333 | NA | NA | NA | NA | NA |
| ZNF790 | LGG | 510 | 1.4 | 0 | 0 | NA | NA | NA | NA | NA |
| ZNF799 | LGG | 510 | 1.5 | 0 | 0 | NA | NA | NA | NA | NA |
| ZNF805 | LGG | 510 | 1.5 | 0 | 0 | NA | NA | NA | NA | NA |
| ZNF808 | LGG | 510 | 1.4 | 3.00E−04 | 0.0015 | NA | NA | NA | NA | NA |
| ZNF816 | LGG | 510 | 1.9 | 0 | 0 | NA | NA | NA | NA | NA |
| ZNF829 | LGG | 510 | 1.3 | 1.00E−04 | 0.000556 | NA | NA | NA | NA | NA |
| ZNF837 | LGG | 510 | 1.5 | 0 | 0 | NA | NA | NA | NA | NA |
| ZNF845 | LGG | 510 | 1.3 | 1.00E−04 | 0.000556 | NA | NA | NA | NA | NA |
| ZNF860 | LGG | 510 | 1.2 | 0.0066 | 0.018104 | NA | NA | NA | NA | NA |
| ZNF880 | LGG | 510 | 1.2 | 0.014 | 0.035449 | NA | NA | NA | NA | NA |
| ZNF90 | LGG | 510 | 1.4 | 0 | 0 | NA | NA | NA | NA | NA |
| ENSG00000267500 | LGG | 510 | 1.3 | 6.00E−04 | 0.002633 | NA | NA | NA | NA | NA |
| ENSG00000267419 | LGG | 510 | 1.3 | 0.0022 | 0.008046 | NA | NA | NA | NA | NA |
| ENSG00000213976 | LGG | 510 | 1.2 | 0.014 | 0.035449 | NA | NA | NA | NA | NA |
| ENSG00000268225 | LGG | 510 | 1.2 | 0.0081 | 0.022066 | NA | NA | NA | NA | NA |
| ENSG00000248452 | KIRP | 287 | 1.4 | 6.00E−04 | 0.013941 | NA | NA | NA | NA | NA |
| ENSG00000215146 | KIRP | 287 | 1.5 | 0.0019 | 0.03263 | NA | NA | NA | NA | NA |
| Name | cancer | n | HR | Pvalue | FDR | cancer | n | HR | Pvalue | FDR |
| ZNF695 | SARC | 259 | 1.4 | 1.00E−04 | 0.01975 | MESO | 85 | 1.68 | 2.00E−04 | 0.0060769 |
| ZNF558 | KIRC | 529 | 1.19 | 0.0039 | 0.0088029 | NA | NA | NA | NA | NA |
| ZNF239 | KIRC | 529 | 1.17 | 0.0228 | 0.0413119 | NA | NA | NA | NA | NA |
| ZNF700 | PRAD | 496 | 2.42 | 3.00E−04 | 0.029625 | NA | NA | NA | NA | NA |
| ZNF587 | SARC | 259 | 1.45 | 3.00E−04 | 0.0395 | NA | NA | NA | NA | NA |
| ZNF7 | UVM | 80 | 1.66 | 0.0115 | 0.0478158 | NA | NA | NA | NA | NA |
| ZNF783 | NA | NA | NA | NA | NA | NA | NA | NA | NA | NA |
| ZNF107 | NA | NA | NA | NA | NA | NA | NA | NA | NA | NA |
| ZNF547 | NA | NA | NA | NA | NA | NA | NA | NA | NA | NA |
| ZNF789 | NA | NA | NA | NA | NA | NA | NA | NA | NA | NA |
| ZNF841 | NA | NA | NA | NA | NA | NA | NA | NA | NA | NA |
| ZNF473 | NA | NA | NA | NA | NA | NA | NA | NA | NA | NA |
| ZNF749 | NA | NA | NA | NA | NA | NA | NA | NA | NA | NA |
| RBAK | NA | NA | NA | NA | NA | NA | NA | NA | NA | NA |
| ZFP30 | NA | NA | NA | NA | NA | NA | NA | NA | NA | NA |
| ZFP69B | NA | NA | NA | NA | NA | NA | NA | NA | NA | NA |
| ZNF121 | NA | NA | NA | NA | NA | NA | NA | NA | NA | NA |
| ZNF200 | NA | NA | NA | NA | NA | NA | NA | NA | NA | NA |
| ZNF251 | NA | NA | NA | NA | NA | NA | NA | NA | NA | NA |
| ZNF282 | NA | NA | NA | NA | NA | NA | NA | NA | NA | NA |
| ZNF283 | NA | NA | NA | NA | NA | NA | NA | NA | NA | NA |
| ZNF337 | NA | NA | NA | NA | NA | NA | NA | NA | NA | NA |
| ZNF354A | NA | NA | NA | NA | NA | NA | NA | NA | NA | NA |
| ZNF419 | NA | NA | NA | NA | NA | NA | NA | NA | NA | NA |
| ZNF432 | NA | NA | NA | NA | NA | NA | NA | NA | NA | NA |
| ZNF485 | NA | NA | NA | NA | NA | NA | NA | NA | NA | NA |
| ZNF496 | NA | NA | NA | NA | NA | NA | NA | NA | NA | NA |
| ZNF514 | NA | NA | NA | NA | NA | NA | NA | NA | NA | NA |
| ZNP517 | NA | NA | NA | NA | NA | NA | NA | NA | NA | NA |
| ZNF525 | NA | NA | NA | NA | NA | NA | NA | NA | NA | NA |
| ZNF530 | NA | NA | NA | NA | NA | NA | NA | NA | NA | NA |
| ZNP550 | NA | NA | NA | NA | NA | NA | NA | NA | NA | NA |
| ZNF707 | NA | NA | NA | NA | NA | NA | NA | NA | NA | NA |
| ZNF746 | NA | NA | NA | NA | NA | NA | NA | NA | NA | NA |
| ZNF766 | NA | NA | NA | NA | NA | NA | NA | NA | NA | NA |
| ZNF80 | NA | NA | NA | NA | NA | NA | NA | NA | NA | NA |
| ZNF814 | NA | NA | NA | NA | NA | NA | NA | NA | NA | NA |
| ZNF850 | NA | NA | NA | NA | NA | NA | NA | NA | NA | NA |
| ZSCAN22 | NA | NA | NA | NA | NA | NA | NA | NA | NA | NA |
| ZNF93 | KIRC | 529 | 1.24 | 0.0049 | 0.0107528 | ACC | 79 | 1.68 | 0.002 | 0.0415789 |
| ZNF18 | UVM | 80 | 2.18 | 1.00E−04 | 0.0010676 | NA | NA | NA | NA | NA |
| ZNF202 | NA | NA | NA | NA | NA | NA | NA | NA | NA | NA |
| ZNF117 | NA | NA | NA | NA | NA | NA | NA | NA | NA | NA |
| ZNF600 | NA | NA | NA | NA | NA | NA | NA | NA | NA | NA |
| ZNF83 | NA | NA | NA | NA | NA | NA | NA | NA | NA | NA |
| ZNF71 | NA | NA | NA | NA | NA | NA | NA | NA | NA | NA |
| ZNF101 | NA | NA | NA | NA | NA | NA | NA | NA | NA | NA |
| ZNF267 | NA | NA | NA | NA | NA | NA | NA | NA | NA | NA |
| ZNF480 | NA | NA | NA | NA | NA | NA | NA | NA | NA | NA |
| HKR1 | NA | NA | NA | NA | NA | NA | NA | NA | NA | NA |
| ZFP28 | NA | NA | NA | NA | NA | NA | NA | NA | NA | NA |
| ZFP69 | NA | NA | NA | NA | NA | NA | NA | NA | NA | NA |
| ZIK1 | NA | NA | NA | NA | NA | NA | NA | NA | NA | NA |
| ZKSCAN5 | NA | NA | NA | NA | NA | NA | NA | NA | NA | NA |
| ZNF112 | NA | NA | NA | NA | NA | NA | NA | NA | NA | NA |
| ZNF12 | NA | NA | NA | NA | NA | NA | NA | NA | NA | NA |
| ZNF132 | NA | NA | NA | NA | NA | NA | NA | NA | NA | NA |
| ZNF133 | NA | NA | NA | NA | NA | NA | NA | NA | NA | NA |
| ZNF134 | NA | NA | NA | NA | NA | NA | NA | NA | NA | NA |
| ZNF136 | NA | NA | NA | NA | NA | NA | NA | NA | NA | NA |
| ZNF137P | NA | NA | NA | NA | NA | NA | NA | NA | NA | NA |
| ZNF155 | NA | NA | NA | NA | NA | NA | NA | NA | NA | NA |
| ZNF160 | NA | NA | NA | NA | NA | NA | NA | NA | NA | NA |
| ZNF17 | NA | NA | NA | NA | NA | NA | NA | NA | NA | NA |
| ZNF175 | NA | NA | NA | NA | NA | NA | NA | NA | NA | MA |
| ZNF180 | NA | NA | NA | NA | NA | NA | NA | NA | NA | NA |
| ZNF20 | NA | NA | NA | NA | NA | NA | NA | NA | NA | NA |
| ZNF211 | NA | NA | NA | NA | NA | NA | NA | NA | NA | NA |
| ZNF214 | NA | NA | NA | NA | NA | NA | NA | NA | NA | NA |
| ZNF221 | NA | NA | NA | NA | NA | NA | NA | NA | NA | NA |
| ZNF224 | NA | NA | NA | NA | NA | NA | NA | NA | NA | NA |
| ZNF227 | NA | NA | NA | NA | NA | NA | NA | NA | NA | NA |
| ZNF229 | NA | NA | NA | NA | NA | NA | NA | NA | NA | NA |
| ZNF230 | NA | NA | NA | NA | NA | NA | NA | NA | NA | NA |
| ZNF235 | NA | NA | NA | NA | NA | NA | NA | NA | NA | NA |
| ZNF248 | NA | NA | NA | NA | NA | NA | NA | NA | NA | NA |
| ZNF252P | NA | NA | NA | NA | NA | NA | NA | NA | NA | NA |
| ZNF256 | NA | NA | NA | NA | NA | NA | NA | NA | NA | NA |
| ZNF260 | NA | NA | NA | NA | NA | NA | NA | NA | NA | NA |
| ZNF264 | NA | NA | NA | NA | NA | NA | NA | NA | NA | NA |
| ZNF266 | NA | NA | NA | NA | NA | NA | NA | NA | NA | NA |
| ZNF268 | NA | NA | NA | NA | NA | NA | NA | NA | NA | NA |
| ZNF274 | NA | NA | NA | NA | NA | NA | NA | NA | NA | NA |
| ZNF28 | NA | NA | NA | NA | NA | NA | NA | NA | NA | NA |
| ZNF300 | NA | NA | NA | NA | NA | NA | NA | NA | NA | NA |
| ZNF304 | NA | NA | NA | NA | NA | NA | NA | NA | NA | NA |
| ZNF316 | NA | NA | NA | NA | NA | NA | NA | NA | NA | NA |
| ZNF320 | NA | NA | NA | NA | NA | NA | NA | NA | NA | NA |
| ZNF331 | NA | NA | NA | NA | NA | NA | NA | NA | NA | NA |
| ZNF333 | NA | NA | NA | NA | NA | NA | NA | NA | NA | NA |
| ZNF334 | NA | NA | NA | NA | NA | NA | NA | NA | NA | NA |
| ZNF345 | NA | NA | NA | NA | NA | NA | NA | NA | NA | NA |
| ZNF347 | NA | NA | NA | NA | NA | NA | NA | NA | NA | NA |
| ZNF35 | NA | NA | NA | NA | NA | NA | NA | NA | NA | NA |
| ZNF350 | NA | NA | NA | NA | NA | NA | NA | NA | NA | NA |
| ZNF354B | NA | NA | NA | NA | NA | NA | NA | NA | NA | NA |
| ZNF37BP | NA | NA | NA | NA | NA | NA | NA | NA | NA | NA |
| ZNF383 | NA | NA | NA | NA | NA | NA | NA | NA | NA | NA |
| ZNF404 | NA | NA | NA | NA | NA | NA | NA | NA | NA | NA |
| ZNF416 | NA | NA | NA | NA | NA | NA | NA | NA | NA | NA |
| ZNF417 | NA | NA | NA | NA | NA | NA | NA | NA | NA | NA |
| ZNF418 | NA | NA | NA | NA | NA | NA | NA | NA | NA | NA |
| ZNF436 | NA | NA | NA | NA | NA | NA | NA | NA | NA | NA |
| ZNF439 | NA | NA | NA | NA | NA | NA | NA | NA | NA | NA |
| ZNF44 | NA | NA | NA | NA | NA | NA | NA | NA | NA | NA |
| ZNF440 | NA | NA | NA | NA | NA | NA | NA | NA | NA | NA |
| ZNF443 | NA | NA | NA | NA | NA | NA | NA | NA | NA | NA |
| ZNF446 | NA | NA | NA | NA | NA | NA | NA | NA | NA | NA |
| ZNF45 | NA | NA | NA | NA | NA | NA | NA | NA | NA | NA |
| ZNF460 | NA | NA | NA | NA | NA | NA | NA | NA | NA | NA |
| ZNF461 | NA | NA | NA | NA | NA | NA | NA | NA | NA | NA |
| ZNF468 | NA | NA | NA | NA | NA | NA | NA | NA | NA | NA |
| ZNF470 | NA | NA | NA | NA | NA | NA | NA | NA | NA | NA |
| ZNF471 | NA | NA | NA | NA | NA | NA | NA | NA | NA | NA |
| ZNF486 | NA | NA | NA | NA | NA | NA | NA | NA | NA | NA |
| ZNF487 | NA | NA | NA | NA | NA | NA | NA | NA | NA | NA |
| ZNF497 | NA | NA | NA | NA | NA | NA | NA | NA | NA | NA |
| ZNF527 | NA | NA | NA | NA | NA | NA | NA | NA | NA | NA |
| ZNF528 | NA | NA | NA | NA | NA | NA | NA | NA | NA | NA |
| ZNF543 | NA | NA | NA | NA | NA | NA | NA | NA | NA | NA |
| ZNF544 | NA | NA | NA | NA | NA | NA | NA | NA | NA | NA |
| ZNF548 | NA | NA | NA | NA | NA | NA | NA | NA | NA | NA |
| ZNF549 | NA | NA | NA | NA | NA | NA | NA | NA | NA | NA |
| ZNF552 | NA | NA | NA | NA | NA | NA | NA | NA | NA | NA |
| ZNF557 | NA | NA | NA | NA | NA | NA | NA | NA | NA | NA |
| ZNF561 | NA | NA | NA | NA | NA | NA | NA | NA | NA | NA |
| ZNF562 | NA | NA | NA | NA | NA | NA | NA | NA | NA | NA |
| ZNF566 | NA | NA | NA | NA | NA | NA | NA | NA | NA | NA |
| ZNF567 | NA | NA | NA | NA | NA | NA | NA | NA | NA | NA |
| ZNF568 | NA | NA | NA | NA | NA | NA | NA | NA | NA | NA |
| ZNF569 | NA | NA | NA | NA | NA | NA | NA | NA | NA | NA |
| ZNF57 | NA | NA | NA | NA | NA | NA | NA | NA | NA | NA |
| ZNF570 | NA | NA | NA | NA | NA | NA | NA | NA | NA | NA |
| ZNF571 | NA | NA | NA | NA | NA | NA | NA | NA | NA | NA |
| ZNF573 | NA | NA | NA | NA | NA | NA | NA | NA | NA | NA |
| ZNF577 | NA | NA | NA | NA | NA | NA | NA | NA | NA | NA |
| ZNF582 | NA | NA | NA | NA | NA | NA | NA | NA | NA | NA |
| ZNF583 | NA | NA | NA | NA | NA | NA | NA | NA | NA | NA |
| ZNF584 | NA | NA | NA | NA | NA | NA | NA | NA | NA | NA |
| ZNF585A | NA | NA | NA | NA | NA | NA | NA | NA | NA | NA |
| ZNF585B | NA | NA | NA | NA | NA | NA | NA | NA | NA | NA |
| ZNF586 | NA | NA | NA | NA | NA | NA | NA | NA | NA | NA |
| ZNF599 | NA | NA | NA | NA | NA | NA | NA | NA | NA | NA |
| ZNF605 | NA | NA | NA | NA | NA | NA | NA | NA | NA | NA |
| ZNF606 | NA | NA | NA | NA | NA | NA | NA | NA | NA | NA |
| ZNF607 | NA | NA | NA | NA | NA | NA | NA | NA | NA | NA |
| ZNF611 | NA | NA | NA | NA | NA | NA | NA | NA | NA | NA |
| ZNF613 | NA | NA | NA | NA | NA | NA | NA | NA | NA | NA |
| ZNF615 | NA | NA | NA | NA | NA | NA | NA | NA | NA | NA |
| ZNF616 | NA | NA | NA | NA | NA | NA | NA | NA | NA | NA |
| ZNF655 | NA | NA | NA | NA | NA | NA | NA | NA | NA | NA |
| ZNF662 | NA | NA | NA | NA | NA | NA | NA | NA | NA | NA |
| ZNF665 | NA | NA | NA | NA | NA | NA | NA | NA | NA | NA |
| ZNF680 | NA | NA | NA | NA | NA | NA | NA | NA | NA | NA |
| ZNF682 | NA | NA | NA | NA | NA | NA | NA | NA | NA | NA |
| ZNF684 | NA | NA | NA | NA | NA | NA | NA | NA | NA | NA |
| ZNF69 | NA | NA | NA | NA | NA | NA | NA | NA | NA | NA |
| ZNF701 | NA | NA | NA | NA | NA | NA | NA | NA | NA | NA |
| ZNF713 | NA | NA | NA | NA | NA | NA | NA | NA | NA | NA |
| ZNF732 | NA | NA | NA | NA | NA | NA | NA | NA | NA | NA |
| ZNF737 | NA | NA | NA | NA | NA | NA | NA | NA | NA | NA |
| ZNF75A | NA | NA | NA | NA | NA | NA | NA | NA | NA | NA |
| ZNF761 | NA | NA | NA | NA | NA | NA | NA | NA | NA | NA |
| ZNF765 | NA | NA | NA | NA | NA | NA | NA | NA | NA | NA |
| ZNF77 | NA | NA | NA | NA | NA | NA | NA | NA | NA | NA |
| ZNF773 | NA | NA | NA | NA | NA | NA | NA | NA | NA | NA |
| ZNF776 | NA | NA | NA | NA | NA | NA | NA | NA | NA | NA |
| ZNF788 | NA | NA | NA | NA | NA | NA | NA | NA | NA | NA |
| ZNF79 | NA | NA | NA | NA | NA | NA | NA | NA | NA | NA |
| ZNF790 | NA | NA | NA | NA | NA | NA | NA | NA | NA | NA |
| ZNF799 | NA | NA | NA | NA | NA | NA | NA | NA | NA | NA |
| ZNF805 | NA | NA | NA | NA | NA | NA | NA | NA | NA | NA |
| ZNF808 | NA | NA | NA | NA | NA | NA | NA | NA | NA | NA |
| ZNF816 | NA | NA | NA | NA | NA | NA | NA | NA | NA | NA |
| ZNF829 | NA | NA | NA | NA | NA | NA | NA | NA | NA | NA |
| ZNF837 | NA | NA | NA | NA | NA | NA | NA | NA | NA | NA |
| ZNF845 | NA | NA | NA | NA | NA | NA | NA | NA | NA | NA |
| ZNF860 | NA | NA | NA | NA | NA | NA | NA | NA | NA | NA |
| ZNF880 | NA | NA | NA | NA | NA | NA | NA | NA | NA | NA |
| ZNF90 | NA | NA | NA | NA | NA | NA | NA | NA | NA | NA |
| ENSG00000267500 | NA | NA | NA | NA | NA | NA | NA | NA | NA | NA |
| ENSG00000267419 | NA | NA | NA | NA | NA | NA | NA | NA | NA | NA |
| ENSG00000213976 | NA | NA | NA | NA | NA | NA | NA | NA | NA | NA |
| ENSG00000268225 | NA | NA | NA | NA | NA | NA | NA | NA | NA | NA |
| ENSG00000248452 | NA | NA | NA | NA | NA | NA | NA | NA | NA | NA |
| ENSG00000215146 | NA | NA | NA | NA | NA | NA | NA | NA | NA | NA |

| Name | cancer | n | HR | Pvalue | FDR | Status |
|---|---|---|---|---|---|---|
| ZNF695 | ACC | 79 | 2.31 | 0 | 0 | UP |
| ZNF558 | NA | NA | NA | NA | NA | UP |
| ZNF239 | NA | NA | NA | NA | NA | UP |
| ZNF700 | NA | NA | NA | NA | NA | UP |
| ZNF587 | NA | NA | NA | NA | NA | UP |
| ZNF7 | NA | NA | NA | NA | NA | UP |
| ZNF783 | NA | NA | NA | NA | NA | UP |
| ZNF107 | NA | NA | NA | NA | NA | UP |
| ZNF547 | NA | NA | NA | NA | NA | UP |
| ZNF789 | NA | NA | NA | NA | NA | UP |
| ZNF841 | NA | NA | NA | NA | NA | UP |
| ZNF473 | NA | NA | NA | NA | NA | UP |
| ZNF749 | NA | NA | NA | NA | NA | UP |
| RBAK | NA | NA | NA | NA | NA | UP |
| ZFP30 | NA | NA | NA | NA | NA | UP |
| ZFP69B | NA | NA | NA | NA | NA | UP |
| ZNF121 | NA | NA | NA | NA | NA | UP |
| ZNF200 | NA | NA | NA | NA | NA | UP |
| ZNF251 | NA | NA | NA | NA | NA | UP |
| ZNF282 | NA | NA | NA | NA | NA | UP |
| ZNF283 | NA | NA | NA | NA | NA | UP |
| ZNF337 | NA | NA | NA | NA | NA | UP |
| ZNF354A | NA | NA | NA | NA | NA | UP |
| ZNF419 | NA | NA | NA | NA | NA | UP |
| ZNF432 | NA | NA | NA | NA | NA | UP |
| ZNF485 | NA | NA | NA | NA | NA | UP |
| ZNF496 | NA | NA | NA | NA | NA | UP |
| ZNF514 | NA | NA | NA | NA | NA | UP |
| ZNP517 | NA | NA | NA | NA | NA | UP |
| ZNF525 | NA | NA | NA | NA | NA | UP |
| ZNF530 | NA | NA | NA | NA | NA | UP |
| ZNP550 | NA | NA | NA | NA | NA | UP |
| ZNF707 | NA | NA | NA | NA | NA | UP |
| ZNF746 | NA | NA | NA | NA | NA | UP |
| ZNF766 | NA | NA | NA | NA | NA | UP |
| ZNF80 | NA | NA | NA | NA | NA | UP |
| ZNF814 | NA | NA | NA | NA | NA | UP |
| ZNF850 | NA | NA | NA | NA | NA | UP |
| ZSCAN22 | NA | NA | NA | NA | NA | UP |
| ZNF93 | NA | NA | NA | NA | NA | NA |
| ZNF18 | NA | NA | NA | NA | NA | NA |
| ZNF202 | NA | NA | NA | NA | NA | NA |
| ZNF117 | NA | NA | NA | NA | NA | NA |
| ZNF600 | NA | NA | NA | NA | NA | NA |
| ZNF83 | NA | NA | NA | NA | NA | NA |
| ZNF71 | NA | NA | NA | NA | NA | NA |
| ZNF101 | NA | NA | NA | NA | NA | NA |
| ZNF267 | NA | NA | NA | NA | NA | NA |
| ZNF480 | NA | NA | NA | NA | NA | NA |
| HKR1 | NA | NA | NA | NA | NA | NA |
| ZFP28 | NA | NA | NA | NA | NA | NA |
| ZFP69 | NA | NA | NA | NA | NA | NA |
| ZIK1 | NA | NA | NA | NA | NA | NA |
| ZKSCAN5 | NA | NA | NA | NA | NA | NA |
| ZNF112 | NA | NA | NA | NA | NA | NA |
| ZNF12 | NA | NA | NA | NA | NA | NA |
| ZNF132 | NA | NA | NA | NA | NA | NA |
| ZNF133 | NA | NA | NA | NA | NA | NA |
| ZNF134 | NA | NA | NA | NA | NA | NA |
| ZNF136 | NA | NA | NA | NA | NA | NA |
| ZNF137P | NA | NA | NA | NA | NA | NA |
| ZNF155 | NA | NA | NA | NA | NA | NA |
| ZNF160 | NA | NA | NA | NA | NA | NA |
| ZNF17 | NA | NA | NA | NA | NA | NA |
| ZNF175 | NA | NA | NA | NA | NA | NA |
| ZNF180 | NA | NA | NA | NA | NA | NA |
| ZNF20 | NA | NA | NA | NA | NA | NA |
| ZNF211 | NA | NA | NA | NA | NA | NA |
| ZNF214 | NA | NA | NA | NA | NA | NA |
| ZNF221 | NA | NA | NA | NA | NA | NA |
| ZNF224 | NA | NA | NA | NA | NA | NA |
| ZNF227 | NA | NA | NA | NA | NA | NA |
| ZNF229 | NA | NA | NA | NA | NA | NA |
| ZNF230 | NA | NA | NA | NA | NA | NA |
| ZNF235 | NA | NA | NA | NA | NA | NA |
| ZNF248 | NA | NA | NA | NA | NA | NA |
| ZNF252P | NA | NA | NA | NA | NA | NA |
| ZNF256 | NA | NA | NA | NA | NA | NA |
| ZNF260 | NA | NA | NA | NA | NA | NA |
| ZNF264 | NA | NA | NA | NA | NA | NA |
| ZNF266 | NA | NA | NA | NA | NA | NA |
| ZNF268 | NA | NA | NA | NA | NA | NA |
| ZNF274 | NA | NA | NA | NA | NA | NA |
| ZNF28 | NA | NA | NA | NA | NA | NA |
| ZNF300 | NA | NA | NA | NA | NA | NA |
| ZNF304 | NA | NA | NA | NA | NA | NA |
| ZNF316 | NA | NA | NA | NA | NA | NA |
| ZNF320 | NA | NA | NA | NA | NA | NA |
| ZNF331 | NA | NA | NA | NA | NA | NA |
| ZNF333 | NA | NA | NA | NA | NA | NA |
| ZNF334 | NA | NA | NA | NA | NA | NA |
| ZNF345 | NA | NA | NA | NA | NA | NA |
| ZNF347 | NA | NA | NA | NA | NA | NA |
| ZNF35 | NA | NA | NA | NA | NA | NA |
| ZNF350 | NA | NA | NA | NA | NA | NA |
| ZNF3548 | NA | NA | NA | NA | NA | NA |
| ZNF37BP | NA | NA | NA | NA | NA | NA |
| ZNF383 | NA | NA | NA | NA | NA | NA |
| ZNF404 | NA | NA | NA | NA | NA | NA |
| ZNF416 | NA | NA | NA | NA | NA | NA |
| ZNF417 | NA | NA | NA | NA | NA | NA |
| ZNF418 | NA | NA | NA | NA | NA | NA |
| ZNF436 | NA | NA | NA | NA | NA | NA |
| ZNF439 | NA | NA | NA | NA | NA | NA |
| ZNF44 | NA | NA | NA | NA | NA | NA |
| ZNF440 | NA | NA | NA | NA | NA | NA |
| ZNF443 | NA | NA | NA | NA | NA | NA |
| ZNF446 | NA | NA | NA | NA | NA | NA |
| ZNF45 | NA | NA | NA | NA | NA | NA |
| ZNF460 | NA | NA | NA | NA | NA | NA |
| ZNF461 | NA | NA | NA | NA | NA | NA |
| ZNF468 | NA | NA | NA | NA | NA | NA |
| ZNF470 | NA | NA | NA | NA | NA | NA |
| ZNF471 | NA | NA | NA | NA | NA | NA |
| ZNF486 | NA | NA | NA | NA | NA | NA |
| ZNF487 | NA | NA | NA | NA | NA | NA |
| ZNF497 | NA | NA | NA | NA | NA | NA |
| ZNF527 | NA | NA | NA | NA | NA | NA |
| ZNF528 | NA | NA | NA | NA | NA | NA |
| ZNF543 | NA | NA | NA | NA | NA | NA |
| ZNF544 | NA | NA | NA | NA | NA | NA |
| ZNF548 | NA | NA | NA | NA | NA | NA |
| ZNF549 | NA | NA | NA | NA | NA | NA |
| ZNF552 | NA | NA | NA | NA | NA | NA |
| ZNF557 | NA | NA | NA | NA | NA | NA |
| ZNF561 | NA | NA | NA | NA | NA | NA |
| ZNF562 | NA | NA | NA | NA | NA | NA |
| ZNF566 | NA | NA | NA | NA | NA | NA |
| ZNF567 | NA | NA | NA | NA | NA | NA |
| ZNF568 | NA | NA | NA | NA | NA | NA |
| ZNF569 | NA | NA | NA | NA | NA | NA |
| ZNF57 | NA | NA | NA | NA | NA | NA |
| ZNF570 | NA | NA | NA | NA | NA | NA |
| ZNF571 | NA | NA | NA | NA | NA | NA |
| ZNF573 | NA | NA | NA | NA | NA | NA |
| ZNF577 | NA | NA | NA | NA | NA | NA |
| ZNF582 | NA | NA | NA | NA | NA | NA |
| ZNF583 | NA | NA | NA | NA | NA | NA |
| ZNF584 | NA | NA | NA | NA | NA | NA |
| ZNF585A | NA | NA | NA | NA | NA | NA |
| ZNF585B | NA | NA | NA | NA | NA | NA |
| ZNF586 | NA | NA | NA | NA | NA | NA |
| ZNF599 | NA | NA | NA | NA | NA | NA |
| ZNF605 | NA | NA | NA | NA | NA | NA |
| ZNF606 | NA | NA | NA | NA | NA | NA |
| ZNF607 | NA | NA | NA | NA | NA | NA |
| ZNF611 | NA | NA | NA | NA | NA | NA |
| ZNF613 | NA | NA | NA | NA | NA | NA |
| ZNF615 | NA | NA | NA | NA | NA | NA |
| ZNF616 | NA | NA | NA | NA | NA | NA |
| ZNF655 | NA | NA | NA | NA | NA | NA |
| ZNF662 | NA | NA | NA | NA | NA | NA |
| ZNF665 | NA | NA | NA | NA | NA | NA |
| ZNF680 | NA | NA | NA | NA | NA | NA |
| ZNF682 | NA | NA | NA | NA | NA | NA |
| ZNF684 | NA | NA | NA | NA | NA | NA |
| ZNF69 | NA | NA | NA | NA | NA | NA |
| ZNF701 | NA | NA | NA | NA | NA | NA |
| ZNF713 | NA | NA | NA | NA | NA | NA |
| ZNF732 | NA | NA | NA | NA | NA | NA |
| ZNF737 | NA | NA | NA | NA | NA | NA |
| ZNF75A | NA | NA | NA | NA | NA | NA |
| ZNF761 | NA | NA | NA | NA | NA | NA |
| ZNF765 | NA | NA | NA | NA | NA | NA |
| ZNF77 | NA | NA | NA | NA | NA | NA |
| ZNF773 | NA | NA | NA | NA | NA | NA |
| ZNF776 | NA | NA | NA | NA | NA | NA |
| ZNF788 | NA | NA | NA | NA | NA | NA |
| ZNF79 | NA | NA | NA | NA | NA | NA |
| ZNF790 | NA | NA | NA | NA | NA | NA |
| ZNF799 | NA | NA | NA | NA | NA | NA |
| ZNF805 | NA | NA | NA | NA | NA | NA |
| ZNF808 | NA | NA | NA | NA | NA | NA |
| ZNF816 | NA | NA | NA | NA | NA | NA |
| ZNF829 | NA | NA | NA | NA | NA | NA |
| ZNF837 | NA | NA | NA | NA | NA | NA |
| ZNF845 | NA | NA | NA | NA | NA | NA |
| ZNF860 | NA | NA | NA | NA | NA | NA |
| ZNF880 | NA | NA | NA | NA | NA | NA |
| ZNF90 | NA | NA | NA | NA | NA | NA |
| ENSG00000267500 | NA | NA | NA | NA | NA | NA |
| ENSG00000267419 | NA | NA | NA | NA | NA | NA |
| ENSG00000213976 | NA | NA | NA | NA | NA | NA |
| ENSG00000268225 | NA | NA | NA | NA | NA | NA |
| ENSG00000248452 | NA | NA | NA | NA | NA | NA |
| ENSG00000215146 | NA | NA | NA | NA | NA | NA |

[0264] ACC Adrenocortical carcinoma
[0265] COAD Colon adenocarcinoma
[0266] STAD Stomach adenocarcinoma
[0267] THCA Thyroid carcinoma
[0268] MESO Mesothelioma
[0269] UVM Uveal Melanoma
[0270] OV Ovarian serous cystadenocarcinoma
[0271] TGCT Testicular Germ Cell Tumors
[0272] PRAD Prostate adenocarcinoma
[0273] BRCA Breast invasive carcinoma
[0274] LUSC Lung squamous cell carcinoma
[0275] SARC Sarcoma
[0276] THYM Thymoma
[0277] PAAD Pancreatic adenocarcinoma
[0278] UCS Uterine Carcinosarcoma
[0279] HNSC Head and Neck squamous cell carcinoma
[0280] KIRC Kidney renal clear cell carcinoma
[0281] SKCM Skin Cutaneous Melanoma
[0282] BLCA Bladder Urothelial Carcinoma
[0283] LUAD Lung adenocarcinoma
[0284] READ Rectum adenocarcinoma
[0285] PCPG Pheochromocytoma and Paraganglioma
[0286] KIRP Kidney renal papillary cell carcinoma
[0287] ESCA Esophageal carcinoma
[0288] LIHC Liver hepatocellular carcinoma
[0289] KICH Kidney Chromophobe
[0290] UCEC Uterine Corpus Endometrial Carcinoma
[0291] CHOL Cholangiocarcinoma
[0292] LGG Brain Lower Grade Glioma
[0293] CESC Cervical squamous cell carcinoma and endocervical adenocarcinoma
[0294] GBM Glioblastoma multiforme
[0295] DLBC Lymphoid Neoplasm Diffuse Large B-cell Lymphoma

### REFERENCE LIST

[0296] 1. Swerdlow S H, Campo E, Pileri S A, et al. The 2016 revision of the World Health Organization classification of lymphoid neoplasms. Blood. 2016; 127(20):2375-2390. doi: 10.1182/blood-2016-01-643569
[0297] 2. Rosenwald A, Staudt L M. Gene Expression Profiling of Diffuse Large B-Cell Lymphoma. Leukemia & Lymphoma. 2003; 44(sup3): S41-S47. doi: 10.1080/10428190310001623775
[0298] 3. Clozel T, Yang S, Elstrom R L, et al. Mechanism-based epigenetic chemosensitization therapy of diffuse large B-cell lymphoma. Cancer Discov. 2013; 3(9): 1002-1019. doi:10.1158/2159-8290.CD-13-0117
[0299] 4. Martin P, Bartlett N L, Chavez J C, et al. Phase 1 study of oral azacitidine (CC-486) plus R-CHOP in previously untreated intermediate- to high-risk DLBCL. Blood. 2022; 139(8): 1147-1159. doi: 10.1182/blood.2021011679
[0300] 5. Reddy A, Zhang J, Davis N S, et al. Genetic and Functional Drivers of Diffuse Large B Cell Lymphoma. Cell. 2017; 171(2):481-494.e15. doi:10.1016/j.cell.2017.09.027
[0301] 6. Lenz G, Wright G W, Emre N C T, et al. Molecular subtypes of diffuse large B-cell lymphoma arise by distinct genetic pathways. Proc Natl Acad Sci USA. 2008; 105(36): 13520-13525. doi: 10.1073/pnas.0804295105
[0302] 7. Dubois S, Tesson B, Mareschal S, et al. Refining diffuse large B-cell lymphoma subgroups using integrated analysis of molecular profiles. EBioMedicine. 2019; 48:58-69. doi: 10.1016/j.ebiom.2019.09.034
[0303] 8. Zhao M, Kim P, Mitra R, Zhao J, Zhao Z. TSGene 2.0: an updated literature-based knowledgebase for tumor suppressor genes. Nucleic Acids Res. 2016; 44(D1):D1023-D1031. doi:10.1093/nar/gkv1268
[0304] 9. Rowe H M, Jakobsson J, Mesnard D, et al. KAP1 controls endogenous retroviruses in embryonic stem cells. Nature. 2010; 463(7278):237-240. doi:10.1038/nature08674
[0305] 10. Castro-Diaz N, Ecco G, Coluccio A, et al. Evolutionally dynamic L1 regulation in embryonic stem cells. Genes Dev. 2014; 28(13): 1397-1409. doi: 10.1101/gad.241661.114
[0306] 11. Ecco G, Imbeault M, Trono D. KRAB zinc finger proteins. Development. 2017; 144(15):2719-2729. doi: 10.1242/dev.132605
[0307] 12. Playfoot C J, Duc J, Sheppard S, et al. Transposable elements and their KZFP controllers are drivers of transcriptional innovation in the developing human brain. Genome Res. 2021; 31(9): 1531-1545. doi: 10.1101/gr.275133.120

The application's sequence listing, which the Patent Office published only in electronic form, follows.

SEQUENCE LISTING (244 sequences)

SEQ ID NO: 1 - DNA, 2431 bp, Homo sapiens
gtagcggacattttgtttctgtcaggctgtccctggccggggttctgtaacgcttgtgtgggccgcaggtggaggtgttgggaaagcgcggaggagatgttgtccccagtgtcccgagacgcgtctgatgctctgcagggacggaagtgcctgcgtccccgatcgagacgcctgccgctcccggcagctgtccgcgcccacggtcctatggcggagctaacggactccgcgcggggctgtgtggtctttgaggatgtgtttgtatacttctctcgggaagaatgggagcttcttgatgatgctcagagacttttgtaccatgatgtgatgctggagaactttgcacttttagcctcactgggaattgcattttccagatcacgtgcagtcatgaaactagagcgaggagaagagccctgggtgtatgaccaggtggatatgacttcagccacagaaagagaggcccagaggggacttagacctggttgttggcatggagtggaggatgaagaggtatcttctgagcagagcatttttgtagcaggagtgtcagaggtcaggactctcatggcagagctggagtctcacccatgtgacatatgtggcccaatattgaaagataccttacacctggctaaataccatgggggaaaagccaggcagaaaccatacttgtgtggggcatgtggaaagcaattctggttcagtacagactttgaccagcaccagaaccagcccaatggagggaaacttttcccaaggaaggagggcagagactctgtgaaaagctgcagagtccatgtgccagagaagaccctcacatgtgggaaaggtaggagagacttttcagccacatctggccttcttcagcatcaggcctctctcagcagcatgaagccccacaagagcactaagcttgtgagtggctttctcatgggacagaggtatcacaggtgtggtgaatgtgggaaagccttcacccgcaaagacacacttgctcggcatcagagaatccacactggagaaaggccttatgagtgtaacgaatgtgggaaattcttcagccaaagctatgacctctttaaacaccagacagttcacactggagaaaggccatacgagtgcagcgaatgtgggaaattctttagacaaatctccggcctgattgagcacaggcgagttcacacgggtgaaagactctatcagtgtggcaaatgtgggaaattttttagcagtaagtctaatctcattcgacaccaggaagttcacacaggagccaggccttatgtatgcagcgaatgtgggaaagagttcagtcggaaacacacacttgttctgcaccaacgaactcacactggagaaaggccttatgagtgcagtgaatgtgggaaggcctttagccaaagctcccaccttaatgtacactggagaattcacagcagtgattatgagtgtagcagatgtggtaaagctttcagctgcatctccaaactcattcagcaccagaaagttcactctggagaaaagccttatgagtgcagcaagtgcgggaaagccttcactcaaagacccaacctcatcaggcactggaaagtccacactggggaaaggccttatgtgtgtagtgagtgcgggagagaattcatccggaaacagacacttgttctgcaccagagggttcatgctggagaaaagctttaagagtgtagcaaatgtgggggaaagtcttaggccaatgcccctgacttactatatggtggggaactagcagtagttaatgagtgcagcagatgcaggaaagccttcccctggaggctgaaccttacccgccattgggaatttcacaccggacacaggccttagcagtctaagcaatgtgctgtctctgttcagcccaacagctcaccctagagtggaactctgggagcagccattgggagggaaccatcagtaagaagtgaaacttcatagatatggacattcccactggggagattccctgtgagtgtcaagtatgtgagatgctttcagcagctgtgttgcactttttaaatggctattggcctttgctggggcaggagccatctgctcctaccatctggcagaatcatactgcgtttaccatttaccccagcatgcttgtgacgggcagacctctcttctctccccagtccctaaaaggtgttgtgagtggtctcacagcccactaggggtcttaatttcctctcttttgatgtaaatggcatggaaataatcagctttgttcaagaggacacagaaggattctgcaaatagcctgcagagacttacctgtgttgattgatttcatatgatgctcgttatggatatatccaatatccaagtcacccagctctggaactgcctgcttcacattgctcatgataataaaggcctgttctttaagccacca

SEQ ID NO: 2 - protein, 534 aa, Homo sapiens
MLSPVSRDASDALQGRKCLRPRSRRLPLPAAVRAHGPMAELTDSARGCVVFEDVFVYFSREEWELLDDAQRLLYHDVMLENFALLASLGIAFSRSRAVMKLERGEEPWVYDQVDMTSATEREAQRGLRPGCWHGVEDEEVSSEQSIFVAGVSEVRTLMAELESHPCDICGPILKDTLHLAKYHGGKARQKPYLCGACGKQFWFSTDFDQHQNQPNGGKLFPRKEGRDSVKSCRVHVPEKTLTCGKGRRDFSATSGLLQHQASLSSMKPHKSTKLVSGFLMGQRYHRCGECGKAFTRKDTLARHQRIHTGERPYECNECGKFFSQSYDLFKHQTVHTGERPYECSECGKFFRQISGLIEHRRVHTGERLYQCGKCGKFFSSKSNLIRHQEVHTGARPYVCSECGKEFSRKHTLVLHQRTHTGERPYECSECGKAFSQSSHLNVHWRIHSSDYECSRCGKAFSCISKLIQHQKVHSGEKPYECSKCGKAFTQRPNLIRHWKVHTGERPYVCSECGREFIRKQTLVLHQRVHAGEKL

SEQ ID NO: 3 - DNA, 5262 bp, Homo sapiens
agtggccattttgattggtgttgggtgtattttccagtgagagaccgcggagtgttgggtcgtgtagaagtgactgaacccagaaggtggagacgagacgttgtcccgactgcacagaggctgctctgcagctccttaaaggcgctaggcgtgacccgcaccaaggccgggatcgggaccaccgtgcccgggtacctgcactgctcgccccctcctttcgaccccgctttccccacccagtcggatggcggcggccgcgctgaggcccccggctcagggcactgtgacctttgaagatgtggctgtgaacttttcccaggaggaatggagtctccttagtgaggctcagagatgcctttatcatgacgtgatgctggagaacctgacacttatatcttctctaggttgttggtatggagcaaaagacgagacaccttctaagcagaccctttctatacaacaggagtccccactcaggacacattggacaggtgtatgtaccaagaaggtccacctctggggaatgtgtggccctctcctgggagatatcttacaccagggaacacaacacaatcagaaattgaatgggtttggggcatatgaaaaaaaattggatgacgatgcaaaccatcatcaagaccagaagcagcacattggagagaaatcgtacagaagcaatgccaagggaacatcttttgtaaagaactgtaaattccatatgtcacatgagccatttatctttcatgaggttgggaaagactttttgtccagcttgagattactccaacaagaggacattcacacttcagggaagtcaaactttgaaactaagcatgggataccccttcagggtggaaaaactcattacatctgtggagagtccacaataccgtttagcaacaaacactcacttgtccttcaccagagacttctccctagagaaggaccttatgtatgcagtgattctgggaaattcactagcaaaagtaatagttttaataatcatcagggagttcgcactggaaaaagaccttatcagtgtggacaatgtgatgaatcattttggtataaggcccacctcactgaacaccagagagttcacactggagaaagaccttatgagtgtggagaatgtgataaatcttttagtcataagcacagtcttgttgaccatcagcgagttcacactggagaaagaccttatgaatgtgacgaatgtgggaaatcttttagccataagcgcagccttgttcaccaccagcgagttcacactggagaaagaccttatcagtgtggagaatgtgggaaatcgtttaatcacaagtgcaacctcattcagcatcagcgagttcacactggagaaagaccttttgagtgtacggcatgtgggaagttatttaggagcaactcccacctaaaggaacaccagagagttcacactggagaaagaccctatgagtgtaaagaatgtaggaaatcatttaggtacaagtcacacctcactgaacaccagagagttcacactggagaaaggccatatgagtgtagagaatgtgggaaatgttttcatcaaaagggcagtctcattcaacatcagcagatccactctggagaaaggccacatgagtgtggagaatgtgggaaatgttttcatcaaaagggcagtctcattcgacatcagcagattcactctggagaaaggccacatgagtgtggagaatgtggaaagtgttttcgtcaaaagggaaacctcattaaacatcaacgagttcacacgggagaaagacatcatgaatgttgaaaatttggcagatctgttggtaaaaagagcaccctcattcaacattcgtgagatcacactggaaagcacttatgagtatggagaatgtgcaaaatcatctagccaaaaggttggcctcattcaacaatagcaagatcacactggggaaaggctttctgagtgtagagaatgtatgaaatcctgtacatagaagttttgcctcaccaaataccagaagggtcacactggagaaagaccctatagttatggggaatttgggaaattacctaacaagaagtcccacctcactgaacactactgagttcacagttgagaaaggccatatgactgtaaggaatttgtaaaattatttagccagaagagctgcattactattcatcagataatttacaatggagaaaggccacataataatttctcacataataaatgtgagaaatcatttccgtacagctctgcgctccatgttcgtaagagttcacactggacaaagccttatgagagcagcgagtagaaaatcctttgtgggaaaactctggtttcattaaacacaggagagttcatgctagagaaaggcctcaacagtgtagcaaatatggaaagacattcactagaagctctgccctgcaagttcacactagagaaagcccttctcagtgaagtaaatttggaaaattgattagtcaaacctctatgctccttcaaaatcagagttcacactggatcaaggctttatggtgtgacaaatatggcacattctttatctaaatgtctaacatattatgcacagacaagctcctgctgtggaagtgccttttgagtgcagagcatttgcgagggcttcactcttctttcactggataccagaatgttgacaggagaaaaataacatagatgtgtgggaatattacttcttgtccagtgtaactgtgggagagagcccttatgaggacaccatcaacctatattgaatgtcatatgtccagtagctgcataaattccaggtatatgggagctgtattgcatttcttatcctgcgtatgtccttgccagatttatttcattcttaggtctctggcaaaagccatttcatctctaccacttggcaggtacctacagtgcatcactcatgcactccatcatattccagaaaaaaagttcaagttgtctcccattcagcagtggtatttttgagtagcctctgcactcgttcctttctcatttctctatgaagagttaggccatggacctgactcagttctggcctagagcagaagtgtccaatcttttggctttcctggtccacattggaagaagaattgtcttgtgccgcatatgaaatacattaacactaatgatagctgatgaacttttttaaaaaatcacacaaaaaccctcataatgttttaagaaagtttacaaatttgtgttgggctgcattcaaagctgtcctgagatacatgcggcccacaagctgcgggttggaccagcttggcctagagaatttttctgattacttgacaagatgggctgtctttcctaggaatctcatgattgtcatgattcttaaaatggaattttccagcctcttaactcaccaacccaagtacaagctgcctctcattgttctggtttctgctatgatgaagtccttatttaagcttccttcaatcttgggaattgtattgactgtattgtgtgaattgtatactcactgcattgtgtggcttagatacaacatggttctggtaccatgaaggattctggtaccatgaaagtttgttggggttactaaactgtgtgactcttagggaacagtatgaaggcagaatatagctctgcatttgtggcctagtttggatggctgcctaaggcctccaaataaagacttcagggctttgtgatctttatttttagatgaaatagtgcaataatatgtgttttcataaatcaacctgagtaggggacagttttagtgacacactttggtgcttctgagaacagcacaaaattattctcttgtttataatggatattgcattctgctcagtactggtgagggaaatctgttctcaagtcctacagtgcattcatgtgtcctgaagtccagaattctgtaggatagtgtcctacgttataagcctggagaaagaaatcataattctttaatttttatttttttagggaaatgatgtcactctgaaactcaggctggaatacactggcatggtcatacctcactgcggcctcaaactcctgggctcaagtgatcctcctgcctcagcctcccgagtacctgagattagcccaggtaatttaagaattttttatagagatagggttttgctattttaccctgactgatgttcaactcctggcctcaagtaatcctctagcatacgcccttgaaagcactaggattacaggtgtgagccaccatgcccagcccaaaaataatttttgtagaattagcatttctaggtagtgaagcagactgcaacagaatagttgggatatactttttttaaaaaggcatccacaatgattcagtcactatgtctgtgatggacaagcaggtacagaaattttcaggacctccataattatgaatctagtgtagcttaggtcattgtcagactaaatctaaaggttttgtggatttctgtagcctatctgggctgcataccaaaaagccatccctgaattagtaggaggaagaggatagggagaaaggaaatctcttagtccagtgatgtggcctttgcaaccagccagcattccaatttaatcaggtggaaatgatcttcctggctcataagtatttggtatcacacaggctaattgccccccttagggcgtgatgagagttaggagagtcaatgtaaaatcacataacctatttgtcaaaaataatgttaaatccagatagttctttcaaattaaatttttaaagctgtaataagactgggcatggtgactcatgcctgttatcccaacactttgggagtccagggtgggagtattgcttgaggtaagaagtttgagactagcctgggtcccatagtaagaccctgtctcttaaaaaataaatactatctttctctctggcctctccatgctccagacaatcactgaattacaatatttgcttaacagtagattaatgtcaattttctggaattttatatgactgatataacatgtttcctcttttcatacctgagtactctcctgagccctatttatttagatgttcttcttttttctttattattatttttatttcacatagcagggatgcatattttgacattcatcaatcatgatatatgagtagttcattctttttatcttagaatatgacatgctatggaaatcactgtatacgaattcatctgcttatggatatgttattgcttcttatttttgtctgttaggaataaaactgcttgttaagcaca

SEQ ID NO: 4 - protein, 518 aa, Homo sapiens
MAAAALRPPAQGTVTFEDVAVNFSQEEWSLLSEAQRCLYHDVMLENLTLISSLGCWYGAKDETPSKQTLSIQQESPLRTHWTGVCTKKVHLWGMCGPLLGDILHQGTQHNQKLNGFGAYEKKLDDDANHHQDQKQHIGEKSYRSNAKGTSFVKNCKFHMSHEPFIFHEVGKDFLSSLRLLQQEDIHTSGKSNFETKHGIPLQGGKTHYICGESTIPFSNKHSLVLHQRLLPREGPYVCSDSGKFTSKSNSFNNHQGVRTGKRPYQCGQCDESFWYKAHLTEHQRVHTGERPYECGECDKSFSHKHSLVDHQRVHTGERPYECDECGKSFSHKRSLVHHQRVHTGERPYQCGECGKSFNHKCNLIQHQRVHTGERPFECTACGKLFRSNSHLKEHQRVHTGERPYECKECRKSFRYKSHLTEHQRVHTGERPYECRECGKCFHQKGSLIQHQQIHSGERPHECGECGKCFHQKGSLIRHQQIHSGERPHECGECGKCFRQKGNLIKHQRVHTGERHHEC

SEQ ID NO: 5 - DNA, 2196 bp, Homo sapiens
gcctgtcaggtccatccggcgatgctgggtctggacgagctcgggaggagtggttgtggccattgcacacaggcggatctgaggttcggcgacgccgctggtcgcgacccgggacaggacaacgacaggaacaccgccgagcccgcgttccccccccgcccagagtcatggcggcagcagccgctctgagggcgcctgctcagagcagtgtgacctttgaagatgtggctgtaaacttttccctggaggaatggagtcttcttaatgaggctcagagatgcctgtaccgtgacgtgatgctggagaccttgacacttatatcctccctgggttgttggcatggaggggaagatgaggcagcaccttctaagcagagcacgtgtatacatatatacaaagaccagggaggtcatagtggagaaaggccttatgagtgtggggaatataggaaattatttaagaacaagtcctgcctcactgaacccagaagagatcacaaacacaggaatgttcgcactggagaaaggccttatgagtgcagcaaatatgggaaattatttcaccaaaagcctacactccatattcatgagagatttcatactgggcaaaagacctatgagtgcagtgagtgtggaaaatcatttcaccaaagctcttcactcttgcagcgtcagacacttcacactagagaaaggccttatgagtgtattgaatgtgggaaagcctttgctgaaaagtccagtctcattaaccacaggaaagttcactctggagcaaagcgttatgaatgcaatgaatgtgggaagtcctttgcttatacatctagtctcattaaacacaggaggattcacactggagagaggccttatgagtgcagtgaatgtgggagatcctttgctgaaaactccagtcttattaaacacttgagagttcacacaggagaaaggccttatgaatgcgttgagtgtggaaaatcatttcgccgaagctcttcactcttgcagcatcagagagttcacactagagaaaggccttatgaatgtagtgaatgtgggaaatcctttagcttaaggtccaacctcattcaccatcagcgagttcatactggagaaaggcatgagtgcgggcagtgtgggaaatcctttagccgaaaatctagccttattatacatctgagagttcacactggagaaaggccttatgagtgcagtgactgtgggaaatcctttgctgaaaactccagccttattaaacacttgagagttcacactggagaaaggccatatgaatgcattgattgtggaaaatcatttcgccacagttcttcgttccgtcgccatcagagagttcatactggaatgaggccttataagtgaagcaaattttggaaattctcttgcccaggctttttgctccttcaaggccagagagttcacaccagatcaaggtgttatgagtgtgacaaatggggaatattctttagctagaatgctagcttctttacataaaagagtgctcccactgaagaagtgccttttgagtgcaatgaatgtgagaaagccttcagccctctctcattggttaccacaatatttacatgaggaaaataccacagatgtggaggtaatattattttttcttcaatataacactggaggaaaccccttatgaggatgccatctgcctaaattgaatgtcatacatcaaatagctgcatacattccaggtatgtgggaactgcatagtatttttcgacctgcccaggtctcttgctagacttctgtgacttacagttctcttctaaaaagcatttcacctttaccacttggcaggtgcccacagtacatcattcgcctaactcatcatgatccagaagtaactttgattttgtttcattcaacagagggattttttagtatcctcagcactcattctattctcatttctttctctccaatgagttaggccatgaacctgactcatttttggcacagaggactcttctgataacttgaaaaaatggactacctttttcagggatcttttggatctcacagagttcttaagatggaattttccagcctgccagtcatgaatctcagacagcctgccacctattgccctgatttgtgttataataaaggccttgttgcttaagacaccttcagtctttgcaggagggcatggaagctccaa

SEQ ID NO: 6 - protein, 402 aa, Homo sapiens
MAAAAALRAPAQSSVTFEDVAVNFSLEEWSLLNEAQRCLYRDVMLETLTLISSLGCWHGGEDEAAPSKQSTCIHIYKDQGGHSGERPYECGEYRKLFKNKSCLTEPRRDHKHRNVRTGERPYECSKYGKLFHQKPTLHIHERFHTGQKTYECSECGKSFHQSSSLLQRQTLHTRERPYECIECGKAFAEKSSLINHRKVHSGAKRYECNECGKSFAYTSSLIKHRRIHTGERPYECSECGRSFAENSSLIKHLRVHTGERPYECVECGKSFRRSSSLLQHQRVHTRERPYECSECGKSFSLRSNLIHHQRVHTGERHECGQCGKSFSRKSSLIIHLRVHTGERPYECSDCGKSFAENSSLIKHLRVHTGERPYECIDCGKSFRHSSSFRRHQRVHTGMRPYK

SEQ ID NO: 7 - DNA, 2352 bp, Homo sapiens
agtagcgaccatttccattggcgttagggagtccttggagcgctgtgttgggaccgtggtggtgactggatccaggaggtcgagagtcgttcttctctttgcacagacgtgactctgcagctctttaacggcgcccgctgctctcaacccagcttaccccacgtggtcccatggcggcggccgcgctaaggttccccgttcagggcacagtgacttttgaagacgtggctgtgaaatttacccaggaggaatggaatctccttagtgaggctcagagatgcctgtaccgtgatgtgacgctggagaacctggcacttatgtcctccctgggttgttggtgtggagtggaagatgaggcggcaccttctaagcagagtatttatatacaaagagagactcaggtcaggactcctatggcaggtgtgtctcccaagaaggcccacccctgtgagatgtgtggcccgatcttgggagacattttgcatgtggcagatcatcagggaacacatcacaagcagaaactgcacaggtgtgaggcctgggggaataaattgtatgacagtggaaactttcatcagcaccagaatgagcacattggagagaaaccctacagagggagtgttgaggaggcgttgtttgcgaagaggtgtaagttgcatgtgtcaggggagtcatctgtcttcagtgagagtgggaaagactttttgctcaggtcaggattactccagcaagaggccactcacactgggaagtcaaacagcaaaactgagtgtgtgtctctgtttcatgggggaaaaagccattacagctgtggaggatgcatgaaacattttagcaccaaagatatactcagtcagcacgagagactgctccctacagaagaaccttctgtgtggtgtgaatgtgggaaatcctctagcaaatatgacagcttcagtaatcatcaaggagttcacactagagaaaaaccttatacgtgtgggatatgtgggaaattatttaacagtaagtcccacctccttgtacaccagagaattcacactggagagaagccatatgagtgtgaggtttgtcagaaattttttaggcacaagtaccacctcattgcacaccagagagttcacactggagaaaggccatatgaatgcagtgattgtgggaagtcatttacccacagctctacattccgtgttcataagagagttcacactggtcagaagccttatgagtgcagtgaatgtgggaaatcttttgccgaaagctccagtctcactaaacacaggagagttcacactggagaaaagccttacgggtgcagtgaatgtgaaaaaaaatttaggcaaatctcttcacttcgtcatcatcagagagttcacaaaagaaagggcttatgagtgcagtgagtccagtctcattaaatattggagaatacacacctgagtaagatcctgtgattgcagcaaatgtggaaaatgtttacccaaaggtctgctctccttggatattggagagttcacactagagaagagtccttacaagtaaaataaatttgggcagttttgtagccacacctctgtattccttcaggattatagttaacactgaatgaaggccttactagtgtgacaaatacaggatatttatccagaagtctggctgcataactcacaggagagctgtcatgtgggaggattgctacatgggaggatttgcttgagcctgggaggcagaggttgcagtgagccgagattgcaacactgcagtccagtctggaccacagagtgagaccctgtttcaaaaataaaatatataaatgacatccaataaagtatgcatatttgagctgtaggataagtcttgaattttctttttcttttttttgagacagcctcgctctgtcacccaggctggagtacagtggcataatctcggctcactgcaagccctgcctcctgggttcatgccattctcctgcctcagcctccctaatagctgggactacaggcaaccaccaccactcctaccttttttgtatttttagtagagatggggtttcaccctgttagccaggaagttctcaatctcctgacctcgtgatctgcccgccttggcctctcaaagtgttgggattgcaggcgtgagccactgctcctggcttgaattttcttataatcccatgaaaccatcatcagagtcacaataatgaatttatctaatctatcacctttgtattcacctggagcctttataaagtttttctctatgcagacaaccattgatttactctgctgtataatactttccattttctagaattttctgactgatgtaataaagtgtttcctcttataa

SEQ ID NO: 8 - protein, 407 aa, Homo sapiens
MAAAALRFPVQGTVTFEDVAVKFTQEEWNLLSEAQRCLYRDVTLENLALMSSLGCWCGVEDEAAPSKQSIYIQRETQVRTPMAGVSPKKAHPCEMCGPILGDILHVADHQGTHHKQKLHRCEAWGNKLYDSGNFHQHQNEHIGEKPYRGSVEEALFAKRCKLHVSGESSVFSESGKDFLLRSGLLQQEATHTGKSNSKTECVSLFHGGKSHYSCGGCMKHFSTKDILSQHERLLPTEEPSVWCECGKSSSKYDSFSNHQGVHTREKPYTCGICGKLFNSKSHLLVHQRIHTGEKPYECEVCQKFFRHKYHLIAHQRVHTGERPYECSDCGKSFTHSSTFRVHKRVHTGQKPYECSECGKSFAESSSLTKHRRVHTGEKPYGCSECEKKFRQISSLRHHQRVHKRKGL

SEQ ID NO: 9 - DNA, 5794 bp, Homo sapiens
gattggtgttgggtttatttgtcggagaggctcctgagcgctaggtcggcactgcggtgactgaacccagaaggcggagaacagttgtcctctgctgcacagaggcgactctggagctctgtgacggcgccaagcgtgacccacccctgggccaggatagggaccgtcatgcccatatctcctggctggtcaccctctcctcccaaccctgctttaaaccacgtggttcgatggcggtggtggccacgctgaggctctctgctcagggcacagtgacttttgaagacgtggctgtgaaatttacccaggaggaatggaatctccttagtgaggctcagagatgcctgtaccgtgatgtgactctggagaacctggcacttatgtcctccctgggttgttggtgtggagtggaagatgaggcggcaccttctaagcagagtatttatatacaaagagagactcaggtcaggactcctgtgacaggtgtgtctcccaagaaggcccacccctgtgagatgtgtggcccgatcttgggagacattttgcatgtggcagatcatcagggaacacatcacaagcagaaactgcacaggtgtgaggcctgggggaataaattgtatgacagtggaaactttcatcagcaccagaatgagcacattggagagaaaccctacagagggagtgttgaggaggcgttgtttgtgaagaggtgtaagttgcatgtgtcaggggagtcatctgtcttcagtgagagtgggaaggactttttgcccaggtcaggattactccagcaggaggccagtcacactggggagaagtcaaacagcaaaactgagtgtgtgtctccctttcagtgtgggggagctcactatagccatggagattccatgaaacattttagcaccaaacatatactcagtcagcaccagagacttctccctcgagaagaatgttatgtgtgctgtgaatgtgggaaatcctttagcaaatatgttagcttcagtaatcatcagagagttcacagtggaaaaagaccttatgaatgtggagaatgtgagaaatcttttagtcaaaagagcagcctcattcaacatcagcaatttcacactggaggaaaaccttatgggtgtgaagaatgtgggaaatattttagcttagaaggatatcttaggcgccatcaaaaagttcacgctggaaaagggccttatgagtgtggagaatgtgggaaatcttttagttcaaacgtgaaccttaagagtcatcagcgcattcacactggagagagaccttacaagtgtggagaatgtgagaaatcttttagtcggaagcccagccttagttaccatcagcgcattcacactgaagtaagaccttacaagtgtggagaatgtgggaaatcttatatttcaaaggggcaccttaggatccatcagcgcatgcacactggagaaagaccttacaagtgtggagactgtgggaaatcttttaatgaaaaaggacaccttaggagtcatcagcgagttcacactacagaaagaccttataagtgtggggaatgtgggaaatgttttagtcacaagggtaacctcattctacaccagcatggccatactagaaaaaggccttatatgtgttgggaatgtggaaaattatttaagaagaagtctcacctccttgtacaccagagaattcacagtggagagaagccatatgcttgtgaggcttgtcagaaattttttaggcacaagtgccacctcactgcacaccagagagttcacactggagaaaggccatatgaatgcagtgattgtgggaagtcatttacccacagctgtgcattcattgttcataagagagttcacactggtcagaagccttatgagtgcagtgaatgtgggaaatcttttgctgcaagctcctatctcactagtcacaggagagttcacactggtcagaagccttatgagtgcagtgaatgtgggaaatcttttgctggaatctccagtctcactaatcacaggagagttcacactggagaaaagccttatgggtgtagtgaatgtgaaaaaaaatttaggaaaagctcttcacttcgttaccatcagagagttcatgaaagaaaggccttatgagtgcagagaatgagtccagtctcattaaatacaggagagcacacacctgagtaagatcttgtgattgcagcaaatgtggaaaatgtttacccaaaagaagtctgctctccttggacattggagagttcacaccagagaaaagtccttacaagtaaaataaatttggcagttttgtagccacacctctgtattccttcaggattatatttaacactgaatgaaggccttactagtgtggcaaatataggctatttatccagaagtctggcttcaaaactcacaggagagctgtcactacggaaatgccttttgaatgtaatgtttgcaaaaaagcactgtgccttctgtcattgaatcctagaacactgagatgagaaaaacactgtagatgtataggttagatatatagggaatgttattattttttcctttttttggagagacggtctcactccatcacccatgctggtgtgcagtgctgcgatcgtagctcactgcatcctccgccccctaggctcaagtgatcttcccaccttagcctccatgtagctgggtccacaggcatgcaccaccatgcctggctattttctcatattagtagatatagggttttaccatgtttccaggctggtatcgaactcctgagctcaagcaatctgtacacctcagcctcccaaagtgctgagattgtaggtttgagtcactgtgctcagccaattatgtttttctgtgtaacatgggaggagatcctttgagggcaccatgtgcccaaattgaaaaaactccaggcatgtggcatctgtattatattttttactatgccctgttatcttgctagacttatgtgactgccacttatctggcaaaagccattacatctcagctacttggtaggtacccacattgcatcattcacctatttcgtattctagaagtatattttggttgtctcccattcacgagagattttttttttaagttttttgtttggttggttggttggttggttggttgtttttttttgttttttttttttttttttttggagacaaagtttcactgtcaccgatactggagtgcagtggtgtgatcctggttcattgcaacctctgcctcctgagttcaagcaattctcctttctcagcctcctgagtagctgggattacaggtgcctgccaccacacccaggtaatttttgtacttttagtagagatggggtttcactatgttggtcaaactgatcttgaactcctaacctcgtgatccacctgccttggcctcccaaagtgctgggattacagtgtgagcctctgcttctggcctttttaaaaattttttaaatttatattttttgtagagacagggtcttgctgtgttgcacagtctggtctcaaactgctggtctcgagtgatccttctgcctggcttcccagaatgttgggattataggcgtggcataagtcaccatgctgggacttttttatttctttaatttttaattccagatctggtcacagaaggatttgttgagtagcctcagcacttcttgctttttcatttctttctgataagttacaccatggaccttccccatttttgtcccagaggactcttgtgctgacttgaaaagatggactattttggctaagcatggtggctcatgcctgtaatcccaacactttgggaggccgaggtgggtggatcacaaggacaggaaggagttcaagaccagcctgggcaatatagtgaaatcctgtctcttctaaaaatataaaaattagccgggcatggtggcgcacctgtagccgcagctactcaggaggctgaggcaggaaaattgcttgaaccccgggaggtagaggttgcagtgagctgagatcatgccactgcactccagcctgggtcctgctaccttgaaggacagcatagctaaactgcgtggcccaagggacagcatgaatgcagaatatagctttcttcacttgtggcctatttgcatagctgcccaaggcctccagtggacgacttcatggctttgtggtcttcatctgtagcatggatactacagattgtgggttcataggtcagctgggtacagggcagtttttataacaacctctggtgggttttttattttagtgtcaatatcacactgaaagattggtgattttttttgaaccagacaaaattctctcttatgaggtatattgcactgtgctcggtactgttgagggaactctgttcagcagatcttacaaggcacacatgtgccatgatatccagaattctgtaaggcaacatcacaggttgtaaggctataggatgaaattataattttatggttacttagttactgcatttatagtcagcagaggggacagcaataaagtttttgaaatatatcttttttttttttttgagacacagtctcactctgtcacccaggctagagtgctgttgcaccatctcggctcactgcaacctgtgccttctgggttcaagcgattctcccacctcagtcacccaagtagctagaattacaggtgcatgccaccacaccactaatgttttgtggttttagtagagacgggtttcaccgtgttgcacagactggtcttgaattcaactcttgagctcaggtgatctgctcacctccgccttccaaagtgctgggactacaggtgtgggccgctgtgtttggctgaaatgtatgtcttttaaaggagtgtccacagttatccagtcactgtgtctgtgatggataagcagatacagaaattctcaagacttccataataatgaatgttgtgtagctaagctttggtcagaggaaataatctaaaggttttgtgaattcatgtaaccttttgggctgctcaccttaaggtaactcctgtattaacaggaggaacagaatagggaaaaagatctcagttcagtgatgtagctttgtgaccagccagtgatccagttcaatcaggtagaaatgaccttcctgctacatcaatatttgcttctatggaggctagtttccccacttagggcatgagaagaattggtaaagtcaacataaaattgccaaacctgtcaccaaaaatgatggcaaatctgtatttttctcttaaaccgtgttataaaagctgtaataaggtataggctgagcatcatggctcatgcctgtattcccagcactttgggaggccagattccttgagaccagtgtggggaacatggcaaaaccttgtctctaggaaaaatagccaggtatggtggcatgtaccttagtcttagtgatgtgggaggattgcttgagcctgggaggcagaagttgcagtgagctaagattgcaacgctgcagtccagcctgggtgatagagtgagaccccatcttaaaaataaaataaagatataaatgacatccaataaagtacacatatttgagctgtaggataagtcttgaattttattataatcccgtgaaaccatcatcagagtcaccataatgaatttatctaatctatcacctttgtatttacttggagcctttataaagtttttctctctgctcttcaaacaaccattgatttactttgctgtatgatggagtactttccattttctggaattttctgactgatgtaataaagtgtttcctcttataa

SEQ ID NO: 10 - protein, 633 aa, Homo sapiens
MAVVATLRLSAQGTVTFEDVAVKFTQEEWNLLSEAQRCLYRDVTLENLALMSSLGCWCGVEDEAAPSKQSIYIQRETQVRTPVTGVSPKKAHPCEMCGPILGDILHVADHQGTHHKQKLHRCEAWGNKLYDSGNFHQHQNEHIGEKPYRGSVEEALFVKRCKLHVSGESSVFSESGKDFLPRSGLLQQEASHTGEKSNSKTECVSPFQCGGAHYSHGDSMKHFSTKHILSQHQRLLPREECYVCCECGKSFSKYVSFSNHQRVHSGKRPYECGECEKSFSQKSSLIQHQQFHTGGKPYGCEECGKYFSLEGYLRRHQKVHAGKGPYECGECGKSFSSNVNLKSHQRIHTGERPYKCGECEKSFSRKPSLSYHQRIHTEVRPYKCGECGKSYISKGHLRIHQRMHTGERPYKCGDCGKSFNEKGHLRSHQRVHTTERPYKCGECGKCFSHKGNLILHQHGHTRKRPYMCWECGKLFKKKSHLLVHQRIHSGEKPYACEACQKFFRHKCHLTAHQRVHTGERPYECSDCGKSFTHSCAFIVHKRVHTGQKPYECSECGKSFAASSYLTSHRRVHTGQKPYECSECGKSFAGISSLTNHRRVHTGEKPYGCSECEKKFRKSSSLRYHQRVHERKAL

SEQ ID NO: 11 - DNA, 6885 bp, Homo sapiens
agtagcggctgtgtatcggcgatgcgggtgtttccccagtttgtggcccctgagtgctgggtgggaccgcggtgactgaacctagaaggtggagaggaatcgtcctcggtgcccagaggcggctctgcagccccgtgacggcgaccactgctcccgggccgtgcttccccaagtagtccgatggcagcggctgtgccgaggcgcccaactcagcagggcactgtgacctttgaagatgtggctgtgaacttttcccaggaggagtggtgtcttcttagtgaggctcagaggtgcttgtaccgtgatgtgatgctagagaacctggctctcatatcctcgctgggttgttggtgtggatcaaaagatgaggaggcaccttgtaagcagagaatttctgtacaaagagagtctcagagcaggactcctagggcaggtgtttctcctaagaaggctcacccctgtgaaatgtgtggcctcatcttggaggatgtttttcactttgctgaccaccaggaaactcatcacaagcagaagctgaacaggagtggagcatgtggaaaaaacttggatgacactgcataccttcatcagcaccagaagcagcatattggagagaaattctacagaaagagtgtcagagaagcatcgtttgtaaagaaacgtaagctcagggtgtcacaggagccatttgtcttccgcgagtttgggaaggacgttctgcccagttcaggattgtgccaagaagaagctgctgtagagaagacagacagtgaaactatgcatggcccaccctttcaggagggaaaaactaattacagttgtggaaaacgcacaaaagccttcagcaccaaacactcagttattccacaccagaaacttttcactagagatggatgttatgtgtgcagtgattgtggaaaatcctttagcagatatgtcagcttcagtaatcatcagcgagatcacactgcaaaaggaccttatgattgtggagagtgtgggaaatcttatagtcgaaagagcagccttattcaacatcagcgagtccacactggacagacagcttatccctgtgaggagtgcgggaaatcttttagtcagaagggcagccttattagccatcagcttgttcacactggagaagggccttatgagtgtagagaatgtgggaaatcttttggtcaaaagggtaacctcattcaacatcagcaaggtcacactggagagagagcttatcactgtggggaatgtgggaaatcttttcgtcagaagttctgctttattaaccatcagcgtgttcacactggagaaaggccttacaagtgtggagaatgtgggaaatcttttggtcaaaagggcaacctcgttcaccatcagcgaggtcatactggagaaaggccctatgagtgcaaggaatgtgggaaatcatttaggtacagatcccacctcactgaacaccagagacttcacactggggaaagaccttacaattgtagggaatgtgggaaattatttaacaggaagtatcatcttctggttcatgagagagttcacactggagaaaggccatatgcgtgtgaggtatgtgggaaattatttggcaataagcacagcgtgactatacatcagaggattcacactggagaaaggccgtatgaatgcagtgaatgtgggaaatcatttctttccagctctgcgcttcatgttcataaaagagttcattctggacaaaagccttataagtgcagtgaatgtggaaaatccttttctgaatgttccagtctcattaaacacaggagaattcacactggagaaaggccttatgaatgcaccaaatgtggaaaaacatttcagcgaagctctaccctccttcatcatcagagttcacacaggagaaaggccttatgagtgcagtgaatatgggaaatcgtttgctgaagcatcccgtctcgttaaacacaggagagttcatactggagaaaggccttatgagtgctgtcaatgtggaaaacatcagaatgtctgctgtcctcggtcttaagcgacttcgtgttgagatggagtcttgttctgtcacccaggctggagtgcagtggtgcagtcttggctcgctgcaacttgggcctcctgggttcatgcaatcctcctacctcagcctcctgagtagctgggattatgagtacacaccaccacgcccagctaatttttgtgtttttagtggagatggggttttaccatgttggccaggctggtctcaaactcctgacctcaagtgatccacccaccttgactcccaaagtgctgaaattacaggcatgagcctctgcacctggccttcattcttttcgtattgcttagaatatgacatgctgaaccaggcatggtggctcatgcttgtaaacctgatgctttgggaggacaaggtggttcattggaggccaggagttagagatcagcctgggcaacatagccagacctcctctctacaaaaagaaaaaagaatgacatgcttcttgtttttgtctgttataaatgaaactgctatatttgaatgcagttgttcatgtaggtatgtttcactatggtaatatggtggtgtgcagtgcctgagtcacgtgatagattaaagtacaactcttttttgagacagagtctcactctgtcacccaggcgggagttaggtggcatgatttcggctcactgcaacctctgcctcccaagttcaactgattcttctgcctcagcctcccgagtagcagggattaccggtgtgcaccaccatgcctggataacttttttttttatttctattagcaatggggtttcaccatgctggccaggcttgttatgaactgacctcaagtgatctgcctgcctcagcttctcaggtgtgacctactgtgcttggcctaatgtacaactttttaagcaatgccaaactatgacttaagaatgaaattattgctcatttgtatatctatctaccatcagtgtccaagaatttctgttctatcttaccaagagggagtatggttagtatttgaaattgtttattattttaataagtggttataacttttgagtcagtggtttatgttttgcattttttttgttttgagacaaagtctcgctctgtctcccaggctagagtaccgtggcacaatctcagctcattgcaacctctgcttcctgggctcaagcactctgcccacctcagcctccagagtagctggaaatacaggtatgcaccaccacaactggataacttttgtattttctgtagagagggttttacctttttgcccagtctgatcgcgaactcctgggctcaggcgatccacttgcctaggctccaaaagtgcttggtctacaggggtgaggcaccctgcctggcctcacctgtaggcttgttttttaaaatgaattttatctatttcccatttcattaatatatttaaaaataatgaaataacaaagacgtatgttggacttcattcattcttcagtgatgtcactttgctgcaaggaatatttggttttcttttttttttttttttccagatggagtctagctctgtctcctaagctacagtgaagtggcatgatctcggcccactgcaacctccacctcctgtgttcaagcgattctgcctcagcctcctgagtagctgggactacaggcatgtgccattatacctggctaattttatttatttattttagtagagatggggtttcaccatgttacccaggctgctctctaccttctgagctcaagtgatccacctgcctcggcctcccaaagtgctgggattacaggtgtcagccactgtacctggctgaatacttggttttcagtaccacaagaactatgagctggttatccacttcatgtggaatcataagcgtcccaaagtgacaatacatatagattgccaggcagtgaaacagttaagatgccaccatagctttcttttcaacatctttctaagattaccttactatttcttttgttccaagtttgtacttcctcacagttctcacatatggaaaggatacacactttgtagaaacaagaactttatgttatccaagttctaggatagccatgagctccaattatctcagagctctgagtcctctactcaatacccattgagatttatgtgttctgaggcttttgtcttctagctacttacttcattctccatgggtaacgtcattcatccacattaactaatttcctcactccaagctcttttctagagataatctccagtccctgtgcagaaactgtcattgcactttctgctgaaatggcagtttcttctcagcaaggtgagattatggaatccagaatcttttttcaggggtcacatgcccatttccccacttgcatgaatgtcgacactgcagccacagttttggccgtaaatgtgaatttggcaagtaaccactgttcccagggaaatgtcccaatcagaagaagattatctgggacactgatactgacagggagatgggacattctgagggacccggaggcagggtgccacctcctcaacttccctgagggctgcctagaatctgtttcctctcactctgaattattcttcctcttatggctgaccaaaaacatggaacctcacaaagtccactgtaacagctttatatttgtgaagtgaagaacatgaagacagtttcaagcaaagttattgagtggacactttgtgttttttttgagaagtctcactctttcacccaggctggagtgcagtggcacgatctcggctcactgcaactccacctcccgggttcacgccattctcttgcctcagcctcctgagtagctgggaccacaagcgcccaccacgtcagcttaatttttttgttttgtttcttgagacagagtcttgctctcttgcccaggttggagtgccgtgtcgcaatctcagctcactgcaacttctacctcctggattcaagcacttctccttgcctcagccacctctttagctgggattacaggtgcgtgccaccacacccagctaatttttgtatttttagcagagaccaggtttcaccatgttggtcaggctggtctcaaactcctgacctcgtgatccacccacctcggcctcccaaagtgctggaattacaggcgtgagccactgcacctggcctgtattcttttctttagtagagacggggttttactgtatttgccaggatggtctcgatctccagacctcgtgatccgcccgccttagcctcccaaagtgctgggattataggcgtgagccaacacgccctggccacttcttgtctttgcaacattttttagatatgtatttgtgttttttggggagcttaatttgctaatggaatctctgttattttcctaacatgcttggtggatacaagagttaagacttcctgtcccgtttagtgtaacaaaagaaagttaagaaatgtggataaaagattgtaagttagaaatggcaagataatcagctatatgaagaatcttggccaggtgtggtggctgaggcctgtaatcccaccactttgggaggctgaggtgggcggatcacaaggtcaggagttcaagaccaccctggccaatattgtgaattcctgtctctactaaaaatacaaaaattagtcgggcatggtggcgggtgcctgtagtcccagctactcgggaggctgaggccagaaaatcggttgaacctgggaggtggaaggtgcactgagccaatatcacaccagtgcactccaacctggtgacagagagacacatcatctcaaaaaaaaaaaaaaaactcaatccataaatgttatactttataactttataacagcatgttatatgggcttagatattatccctaaatttttttttttttttttttttttgagacagagtctcactctgtcacccaggctgaagtgcaatggcatggtctcggctcactgcaacctccgcctcccaggttcaagtgattctcttgcctcagcctcccgagtagctgggcctataggttccctccaccacgcccagctaatttttgtatttttagtagagatgggctttcactacgttagccaggctggtctcaaactcctgacctcatgatccacccccctcggcctcctaaagtgctgggattacaggcatctgccaccgcactcggcttatccctagaaatcctatgatagcatgatgtataggcacctaaaggcatggcacttgagaaatgtgaataagattgtaagttacaaatagcaaggtacagtcagatgttaacagtctcagcccctaaatgtcaccttgtattacagcatgttatataagcacatacaggcacatacatgaaatagtgatacttcattctcagtaatatcttcatccttctcactggaaagatctttgatgatttttaatcaacataggagtttcaatgatatctagaagtttaaaagggctcgttcaaacaaattatgaccacacacactgaagagtatgtttgtctcttgtggtgtaaatttttttttattacaccaaattatgttcacacaaaacctttgtaatcagggggaattaaagagccttcctggaaaatggaggttgcaatcagccgagatggtgccatcgcactctagcctggggaatagagtgagatcctgcctcaaaaaaaacaaaaaaattctttattttctccataaactacagtttatataagcaaaagtttcagtactaagcaattttagtctctgcagtctcttgtcttgaattaatacaacttttgttaattctcttatgaagttaatcttcctgcttgtatgtgaattaaatatatgtcaaactttttttgtacaaaa

SEQ ID NO: 12 - protein, 575 aa, Homo sapiens
MAAAVPRRPTQQGTVTFEDVAVNFSQEEWCLLSEAQRCLYRDVMLENLALISSLGCWCGSKDEEAPCKQRISVQRESQSRTPRAGVSPKKAHPCEMCGLILEDVFHFADHQETHHKQKLNRSGACGKNLDDTAYLHQHQKQHIGEKFYRKSVREASFVKKRKLRVSQEPFVFREFGKDVLPSSGLCQEEAAVEKTDSETMHGPPFQEGKTNYSCGKRTKAFSTKHSVIPHQKLFTRDGCYVCSDCGKSFSRYVSFSNHQRDHTAKGPYDCGECGKSYSRKSSLIQHQRVHTGQTAYPCEECGKSFSQKGSLISHQLVHTGEGPYECRECGKSFGQKGNLIQHQQGHTGERAYHCGECGKSFRQKFCFINHQRVHTGERPYKCGECGKSFGQKGNLVHHQRGHTGERPYECKECGKSFRYRSHLTEHQRLHTGERPYNCRECGKLFNRKYHLLVHERVHTGERPYACEVCGKLFGNKHSVTIHQRIHTGERPYECSECGKSFLSSSALHVHKRVHSGQKPYKCSECGKSFSECSSLIKHRRIHTGERPYECTKCGKTFQRSSTLLHHQSSHRRKAL

SEQ ID NO: 13 - DNA, 6244 bp, Homo sapiens
attttgattggtgttggatttatttgtaggagaggctcctgagcgctaggtccgcactgtggtgactgaacccagaagtcggggagcagttgtcctccgctgcacagaggctactctggagctctgtgacggcgcccagcgtgacccactcctgggccaggatacggaccgtcgtgcccatatctcctggctggtcgccctatcctcccgactctgcttaaaaccacgtggttcgatggctgccgcggctacgctgaggctctccgctcagggcacagtgacttttgaagatgtggctgtgaactttacctgggaggaatggaatctccttagtgaggctcagagatgcctgtaccgtgatgtgacgctggagaacctggcacttatatcctccctgggttgttggtgtggagtggaagatgaggcggcaccttctaagcagagtatttatatacaaagagagactcaggtcaggactcctatggcaggtgtgtctcccaagaaggcccacccctgtgagatgtgtggcccgatcttgggagacattttgcatgtggcagatcatcagggaacacatcacaagcagaaactgcacaggtgtgaggcctgggggaataaattgtatgacagtggaaactttcatcagcaccagaatgagcacattggagagaaaccctacagagggagtgttgaggaggcgttgtttgcaaagaggtgtaagttgcatgtgtcaggggagtcatctgtcttcagtgagagtgggaaggactttttgcccaggtcaggattactccagcaggaggccagtcacactggggagaagtcaaacagcaaaactgagtgtgtgtctcccattcagtgtgggggagctcactacagctgtggagaatccatgaaacattttagcaccaaacatatactcagtcagcaccagagactgctcactagagaagagtgttatgtgtgctgtgaatgtgggaagtcctttagcaaatatgctagcttgagtaatcatcagagagttcacactgaaaaaaaacatgaatgtggagaatgtgggaaatcctttagcaaatatgttagcttcagtaatcatcagagagttcacactgaaaaaaaacatgaatgtggagaatgtgggaaatcctttagcaaatatgttagcttcagtaatcatcagagagttcacactgggaaaagaccttatgaatgtggagaatgtgggaaatcgtttagcaaatatgctagcttcagtaatcatcagagagttcacactgaaaaaaaacattatgaatgtggagaatgtgggaaatcctttagcaaatatgttagcttcagtaatcatcagagagttcacactgggaaaagaccttatgaatgtggagaatgtgggaaatcgtttagcaaatatgctagcttcagtaatcatcagagagttcacactgacaaaaaacattatgaatgtggagaatgtgggaaatcctttagtcaaaagagcagcctcattcaacatcagcgatttcacactggagaaaaaccttatgggtgtgaagaatgtgggaaatcttttagttcagaaggacatcttaggagccatcaacgagttcacgccggagaaagacctttcaagtgtggagaatgtgtgaaatctttcagtcataagcgcagccttgttcaccatcagcgagttcacagtggagaaagaccttatcagtgtggagaatgtgggaaatctttcagtcaaaagggcaacctcgttctacaccagcgagttcacactggagcaagaccttatgagtgtggagaatgtgggaaatcatttagttcaaaaggacatcttaggaaccatcagcaaattcacactggggacagactttatgagtgtggagagtgtgggaaatcttttagtcataaaggcaccctcattctacatcagcgagttcaccctagagaaagatcttatgggtgtggagaatgtgggaaatcttttagttcaatcgggcaccttaggagccatcagcgcgttcatactggagagaggccttatgagtgtggagaatgtgggaaatcttttagtcataagcgcagccttgttcaccatcagcgcatgcacactggagaaagaccttacaagtgtggagactgtgggaaatcttttaatgaaaaaggacaccttaggaatcatcagcgagttcacactacagaaagaccttttaagtgtggggaatgtgggaaatgttttagtcacaagggtaacctcattctacaccagcatggccatactggagaaagaccttatgtatgtagggaatgtggaaaattatttaagaagaagtctcacctccttgtacaccagagaattcacaatggagaaaagccatatgcttgtgaagcttgtcagaaattttttagaaacaagtaccaactcattgcacatcagagagttcacactggagaaaggccttatgaatgcaatgattgtggaaaatcatttacccacagctctacattctgtgttcataagcgaattcacactggagaaaagccttatgagtgcagtgaatgtggaaaatctttcgctgaaagctccagtttcacaaaacacaaaagagttcacactggagaaaagccttatgagtgcagtgaatgtggaaaatcttttgctgaaagctccagtctcactaaacacaagagagttcacactggagaaaagccttataaatgtgagaaatgtgggaaattatttaacaagaagtctcacctccttgtacaccagagttcacactggagaaaagccatatgagtgtgaggattgtcagaaagtttttagcaagaaggaccacctcattgcacaccagagagttcacactggagaaaggccatatgaatgcagtgattgtgggaagtcatctacccacagctctgcattctgtgttcataagagagttcacactggtcacaccaccttatgagtgcagtgaatgtgggaaatcctttgctgaaactttcagtctcattaaacacaggagagttcacactggagtaaggtcttgtgattgcagcaaatgtgggaaaaaagttacctgaaggtcttttctccttgaatatcagagagttcacactagacaaataaaatacatttgggcaattttgtagccacacctctttgctccttcaagatcagagttaacactggatcagggccttaccagtgtgacatgtgagatatttatgtagaaatctagcttcataacacacaggagacttcccactgcagaaatgccttttgaatgtaatgaatgcaagaaagccttcagcctttttattggagcctcaaacattgacatgagaaaaacaccatagatgtatatggaatgttatttctttttcaatgtaaccctttgagagtgccacctacctagattgaatgtcatttattgagcatctgcaaaagttccaagtgtgtggcagctacagtgcatttttcactatacccaggtaccttgctagattttttttgagacaggttgtcactgtgtcgctcaggatggcgtgcagtggtgtgttcacatttcactgcacccttgatctgggcttaagtgattctgttgcctcggcctcctgagtagctgaaaccacaggcatgcactaccatgctccactaatttttttaagttttggagagacagggtctcaccatgttgcccaggctggtcttaaactcctggctcaagcgatccttccaccttggcctccaaacatgctgggattacaggtgtgagttactgtgcctggccttttttttttttttttttaacttttaatttctgatcgagtcacagaaggatttgttgagtagcttcagcacttcttcctttgtcatttttttctgtctgataagtcatgccatggacgttacccatttttatcccagaggcctcttacgttgacttgaaaagacggactatgtctttcagagatcttgtgggtatcacatcaatcttgacaaattttctaccctccaagtcatgatcctaagaacagcttgcctcccatttctccggtttgtgctattatgaaggccttattgtttcagccttcttcaatcttgagggttgttgtcactgtatgggtggttcagaaataagtaggtcctgttactatgaagggggtcacagcttttgttggcatagctaaactttgtggctcatggaacagtatgaatgcagaatgtagctttctccacttgtggactgctttgcatagctgccagaggcctccagagaagaccttcagggctttgtggtctttatctgtagcacggatactaaaatttgtgggttcataggtcagctggatacagggcattttttgtgacaatttctggcattttttgaacaagacaaaattcttttacgaggtatattgcattgtacttggtacggctgagggaagtctgttgcccagctcttgcaatgcagacacatgccctgatatccagaattctgtaggataacatcacagattgtaatgctatcaggtgaaattataattttatagaattactttatttataggcagtggaggagacagaataatgtaactgcaactcatgtcttttttttctttttttttctttttttttgaggcagagcctcaccctgttgcccaggctggagtgcagtggcataatcttggctcacggcaacctctgcctcccaggttcaaacgattctcctgcctcagcctcctgagtagctgggactacaggcacatgccaccacacccagctaatttttgtatttttagtagagatggggtttcaccatgttggccaggctggtctcgaactcctgaccttgtgatctgctggcctcagcctcccaaagtcctgggattacaggtgagccaccacgtgcagcgtaatgcatgtcttttaaaagggcatccacaatgatccagtcactacgtatatgatgaatatgcagatacaggaattatcaggacttccataatgatgaatattgtattgttgaggccattgtcagaggaaataatctaaaggttttgtgaattcctgtactcattctgggctgttctcctcaaggtcattcctgcattaacaggaggaagatgatagggagaagggagatctcagttcagtgatgtggcctttgtgaccagccagccacttaatcaggtggaaatggccttagtgccacatcaatatttgctaccgtggaggctagttttcccacttagggcatgagaagaattggtgtagtcagtatagagttgccaaacctgttttccaaaaataatggtaaatctatatttttcttttgaactgcatttttttaattattattattatttattttgagacggagtcttgctctgttgcccaggctggatggagtgcagtggcacgatctcggctcactgcaagctctgcctcctgggttcacaccattcttctgcctcagcctcccaagtagctgggactacaggtgcccgccaccatacccagctaattttttgtatctttactagagatggggtttcaccatgttaactaggatggtctcgatctcctgacctcgtgatccgcctgccttggcctcccaaagtgctgggattataggcatgagccaccgtgcccaaccttttttttttttttttgagacagagtctcactgtcagccaggctggagtgcagtggcatgaccttggctcattgcaacctctacctcctaggttcaagcaattctcctggctcagcctcccatgtaggtgggactggaagcatgtgccaccatgcccggccaagttttgtatttttagtagagacggagttttgccatgttggccaggctgatcttggactcctgacctcaggtgatatgcctgcctcagcctcccagagtggtgggaatacaggtgtgagccactgctgccagtctgaagtatattttaaagctgtgatgagttataaatgacattcagtaagctatgcatatttaagctgtagcatgtgataaatcttgagtttcatataatcccatgaaaccattaacatagtcacaataatgaacttaacacctttatatttacttggaacctttttataaaggctttctttctgttctccagacaaccaatgatttactttgctgtacagtagagtactttccattttctggaatgttagatgagtgatgtaataaagtgtttcctcttataa

SEQ ID NO: 14 - protein, 855 aa, Homo sapiens
MAAAATLRLSAQGTVTFEDVAVNFTWEEWNLLSEAQRCLYRDVTLENLALISSLGCWCGVEDEAAPSKQSIYIQRETQVRTPMAGVSPKKAHPCEMCGPILGDILHVADHQGTHHKQKLHRCEAWGNKLYDSGNFHQHQNEHIGEKPYRGSVEEALFAKRCKLHVSGESSVFSESGKDFLPRSGLLQQEASHTGEKSNSKTECVSPIQCGGAHYSCGESMKHFSTKHILSQHQRLLTREECYVCCECGKSFSKYASLSNHQRVHTEKKHECGECGKSFSKYVSFSNHQRVHTEKKHECGECGKSFSKYVSFSNHQRVHTGKRPYECGECGKSFSKYASFSNHQRVHTEKKHYECGECGKSFSKYVSFSNHQRVHTGKRPYECGECGKSFSKYASFSNHQRVHTDKKHYECGECGKSFSQKSSLIQHQRFHTGEKPYGCEECGKSFSSEGHLRSHQRVHAGERPFKCGECVKSFSHKRSLVHHQRVHSGERPYQCGECGKSFSQKGNLVLHQRVHTGARPYECGECGKSFSSKGHLRNHQQIHTGDRLYECGECGKSFSHKGTLILHQRVHPRERSYGCGECGKSFSSIGHLRSHQRVHTGERPYECGECGKSFSHKRSLVHHQRMHTGERPYKCGDCGKSFNEKGHLRNHQRVHTTERPFKCGECGKCFSHKGNLILHQHGHTGERPYVCRECGKLFKKKSHLLVHQRIHNGEKPYACEACQKFFRNKYQLIAHQRVHTGERPYECNDCGKSFTHSSTFCVHKRIHTGEKPYECSECGKSFAESSSFTKHKRVHTGEKPYECSECGKSFAESSSLTKHKRVHTGEKPYKCEKCGKLFNKKSHLLVHQSSHWRKAI

SEQ ID NO: 15 - DNA, 4685 bp, Homo sapiens
agtagcggctgtgtatcggtgacgcgggtgtttccccagtttgtggcccctgagtgctggggggggaccgcggtgactgaacctagaaggtggagaggaatcgtcctcggtgcccagaggcggctctgcagccccgtgacggcgaccactgctcccgggccgtgcttccccaagtagtccgatggcagcggctgcgccgaggcgcccgactcagcagggcactgtgacctttgaagatgtggctgtgaacttttcccaggaggagtggtgtcttcttagtgaggctcagaggtgcttgtaccgtgatgtgatgctagagaacctggctctcatatcctcgctgggttgttggtgtggatcaaaagatgaggaggcaccttgtaagcagagaatttctgtacaaagagagtctcagagcaggactcctagggcaggtgtttctcctaagaaggctcacccctgtgaaatgtgtggcctcatcttggaggatgtttttcactttgctgaccaccaggaaactcatcacaagcagaagctgaacaggagtggagcatgtggaaaaaacttggatgacactgcataccttcatcagcaccagaagcagcatattggagagaaattctacagaaagagtgtcagagaagcatcgtttgtaaagaaacgtaagctcagggtgtcacaggagccatttgtcttccgcgagtttgggaaggacgttctgcccagttcaggattgtgccaagaagcagctgctgtagagaagacagacagtgaaactatgcatggcccaccctttcaggagggaaaaactaattacagttgtggaaaacgcacaaaagccttcagcaccaaacactcagttattccacaccagaaacttttcactagagatggatgttatgtgtgcagtgattgtggaaaatcctttagcagatatgtcagcttcagtaatcatcagcgagatcacactgcaaaaggaccttatgattgtggagagtgtgggaaatcttatagtcgaaagagcagccttattcaacatcagcgagtccacactggaaagacagcttatccctgtgaggagtgcgggaaatcttttagtcagaagggcagccttattagccatcagcgtgttcacactggagaaaggccttatgagtgtagagaatatgggaaatcttttggtcaaaagggtaacctcattcaacatcagcaaggtcacactggagagagagcttatcactgtggggaatgtgggaaatcttttcgtcagaagttctgctttattaaccatcagcgtgttcacactggagaaaggccttacaagtgtggagaatgtggaaaatcttttggtcaaaagggcaacctcgttcaacatcagcgaggtcatactggagaaaggccctatgagtgcaaggaatgtgggaaatcatttaggtacagatcccacctcactgaacaccagagacttcacactggggaaagaccttacaattgtagggaatgtgggaaattatttaacaggaagtatcatcttctcgttcatgagagagttcacactggagaaaggccatatgcgtgtgaggtatgtgggaaattatttggtaataagaactgcgtgactatacatcagaggattcacactggagaaaggccgtatgaatgcaatgaatgtgggaaatcatttctttccagctctgcgcttcatgttcataaaagagttcattctggacaaaagccttataagtgcagtgaatgtggaaaatcctttgctgaatgttccagtctcattaaacacaggagaattcacactggagaaaggccttatgaatgtaccaaatgtggaaaaacatttcagcgaagctctaccctccttcatcatcagagttcacacaggagaaaggccttatgagtgcagtgaatatgggaaatcgtttgctgaaacatcccgtctcattaaacacaggagagttcatactggagaaaggccttatgagtgctgtcaatctgggaaacatcagaatgtctgctctccttggtcttaagagacttcgcattggaacggagtctcattctgtcacccaggctggagtgcagtggtgcaatcttggctcactgcaacttgggcctcccaggttcaagtgattctcctacctcagcctcccaaggagctgagattacgagtacaccacaccatgcccggccaaatacttggttttcagtaccacaagagctatgagctggttatccacttcatgtggaatcataagtgtccccaagtgacaatacgtatagattgctgggcagtgaaacagttaagatgtcaccgtagcttgctttctattcaacatctttctaagattaccttactatttcttttgttccaagtttgtatttcctcagagttctcacatatggaaaggatacacactttgtagaaacaagaactttatgttatccaagttctgggatagccatgagctccaattacctcagagctccgagtcctctactcagtacccgttgagatttatgtgttctgaggcttttgtcttctagctacttacttcattctccatgggtaacgtcattcatccacattaactaatttcctcactccaagctcttttctggagataatctccagtccctgtgcagacactgtcattgcactttctgctgaaatggtagtttcttgccagcaaggtgagattatggaatccagaatcttttttcaggggccacatgcccatttccccacttgcatgaatgtcgacactgtagccacagttttggccgtaaatgtgaatttggcaagtaaccactgttcccaaattgggaaatgtcccagtcagaagaagattatctgggacactgatactgacagggagatgggacattctgagggacccggaggcagggagccacctcctcagcttccctgagggctgcctagaatctctcttgtttcctctcactctgaattattcttcctctcatgactgaccaaacacatggaacctcacaaagtccattttaagagctttatcttgtgaagtgaagaacatgaagatagtttgaatcaaagttattgagtggacacttaatgtctttataacattttttacatatgtgtttgtgttttttggggagcataatttgcaaatggaatatctgttattttactaagatgcttcatggatacaagagttaaaacttcctgtcccatttagtgaaacaaaaggttaagaaatgtggataaagcttgtaagttagaaatggcaagataatcagctatatgaagaatctcagctgggtgttttggctcaggcctgtaatcccagcactttgggaggctgaggtgggtggcttacaaggtcaggagttcaagaccaccctggacaatatggtgaaaccctgtctctactaaaaatacaaaaattacccaagcatagtggtgggtgcctgtagtcccagctgcttgggaggctgaggcaggagaattcgttaaacctgggaggcataggttgcagtgagccgagattgcaccactgcactccagcctggtgacagagcgagactccgtctcaaaaaaaaaaaaaaaaaaaaaaaaaaatctcaatccctaaatgttaccttttataacagcaggttatatgggcttagatattatccctaaatttttttttttttttttttttgagacagagtctcactctgtcacccaggctgaagtgcaatggcatggtctcggctcactgcaacctccgcctcccaggttcaagtgattctcttgcctcagcctcccaagtagctgggcctataggttccctccaccacgcccacctaatttttgtatttttagtagagatgggctttcactacgttagccaggctggtctcaaacttgtgacctcatgatccacccccctcagcctcctaaagtgctgggattacaggcatctgccacggcactcggcttatccctagaaatcctatgatagcatgatgtataggcacctaaaggcatggcacttgagaaatgtgaataagattgtaagttacaaatagcaaggtacagtcagatgttaacagtctcagcccctaaatgtcaccttgtattacagcatgttatataagcacatacaggcacatacatgaaatagtgatacttcattctcagtaatatttttcatccttctcactggaaagatctttgatgatttttaatcaacataggagtttcaatgatatctagaagtttaaaagggctcgttcaaacaaattatgaccatacaccctgaagagtatgtgtctgtctcttgtggtgtaaatttttattttattacacccaattatgttcccacaaaacctttataattgggaaattaaggagccttcctcggaaatggaggttgcaatcagctgagatggtaccactgcactctagcctgggcaaaagagcaaggccctgcctcaaaaaaaacaaaacttttttcttcataaactacagtttatataggcaaaactttcagtactaagcaattttagtctctgcaggctcttgtcttgaattaatacaacttttgttaattctcttatgaagttaaatcttcctgcttgtatgcaacttatatgttgaaatttttttgtacaaaagattcatacatctttcctgtttgaaatta

SEQ ID NO: 16 - protein, 575 aa, Homo sapiens
MAAAAPRRPTQQGTVTFEDVAVNFSQEEWCLLSEAQRCLYRDVMLENLALISSLGCWCGSKDEEAPCKQRISVQRESQSRTPRAGVSPKKAHPCEMCGLILEDVFHFADHQETHHKQKLNRSGACGKNLDDTAYLHQHQKQHIGEKFYRKSVREASFVKKRKLRVSQEPFVFREFGKDVLPSSGLCQEAAAVEKTDSETMHGPPFQEGKTNYSCGKRTKAFSTKHSVIPHQKLFTRDGCYVCSDCGKSFSRYVSFSNHQRDHTAKGPYDCGECGKSYSRKSSLIQHQRVHTGKTAYPCEECGKSFSQKGSLISHQRVHTGERPYECREYGKSFGQKGNLIQHQQGHTGERAYHCGECGKSFRQKFCFINHQRVHTGERPYKCGECGKSFGQKGNLVQHQRGHTGERPYECKECGKSFRYRSHLTEHQRLHTGERPYNCRECGKLFNRKYHLLVHERVHTGERPYACEVCGKLFGNKNCVTIHQRIHTGERPYECNECGKSFLSSSALHVHKRVHSGQKPYKCSECGKSFAECSSLIKHRRIHTGERPYECTKCGKTFQRSSTLLHHQSSHRRKAL

SEQ ID NO: 17 - DNA, 21 bp, Homo sapiens
gcttatacatctagtctcatt

SEQ ID NO: 18 - DNA, 57 bp, Unknown
  synthetic sequence
ccgggcttatacatctagtctcattctcgagaatgagactagatgtataagcttttt

SEQ ID NO: 19 - DNA, 21 bp, Homo sapiens
gcagcaaatatgggaaattat

SEQ ID NO: 20 - DNA, 57 bp, Homo sapiens
ccgggcagcaaatatgggaaattatctcgagataatttcccatatttgctgcttttt

SEQ ID NO: 21 - DNA, 21 bp, Homo sapiens
gccaaagctatgacctcttta

SEQ ID NO: 22 - DNA, 57 bp, Unknown
  synthetic sequence
ccgggccaaagctatgacctctttactcgagtaaagaggtcatagctttggcttttt

SEQ ID NO: 23 - DNA, 21 bp, Homo sapiens
agtcgaaagagcagccttatt

SEQ ID NO: 24 - DNA, 62 bp, Unknown
  synthetic sequence
ccggagtcgaaagagcagccttattctcgagaataaggctgctctttcgactttttttgaat

SEQ ID NO: 25 - DNA, 21 bp, Homo sapiens
gcagcatattggagagaaatt

SEQ ID NO: 26 - DNA, 57 bp, Unknown
  synthetic sequence
ccgggcagcatattggagagaaattctcgagaatttctctccaatatgctgcttttt

SEQ ID NO: 27 - DNA, 21 bp, Homo sapiens
cgggaagaatgggagcttctt

SEQ ID NO: 28 - DNA, 57 bp, Unknown; identical to SEQ ID NO: 26
  synthetic sequence

SEQ ID NO: 29 - DNA, 21 bp, Homo sapiens
cgggagaaagacatcatgaat

SEQ ID NO: 30 - DNA, 57 bp, Unknown
  synthetic sequence
ccggcgggagaaagacatcatgaatctcgagattcatgatgtctttctcccgttttt

SEQ ID NO: 31 - DNA, 21 bp, Homo sapiens
tatgtcacatgagccatttat

SEQ ID NO: 32 - DNA, 58 bp, Unknown
  synthetic sequence
ccggtatgtcacatgagccatttatctcgagataaatggctcatgtgacatatttttg

SEQ ID NO: 33 - DNA, 21 bp, Homo sapiens
gcagatcatcagggaacacat

SEQ ID NO: 34 - DNA, 57 bp, Unknown
  synthetic sequence
ccgggcagatcatcagggaacacatctcgagatgtgttccctgatgatctgcttttt

SEQ ID NO: 35 - DNA, 21 bp, Homo sapiens
gctctacattccgtgttcata

SEQ ID NO: 36 - DNA, 57 bp, Unknown
  synthetic sequence
ccgggctctacattccgtgttcatactcgagtatgaacacggaatgtagagcttttt

SEQ ID NO: 37 - DNA, 21 bp, Homo sapiens
ccttctaagcagagtatttat

SEQ ID NO: 38 - DNA, 57 bp, Unknown
  synthetic sequence
ccggccttctaagcagagtatttatctcgagataaatactctgcttagaaggttttt

SEQ ID NO: 39 - DNA, 21 bp, Homo sapiens
cagcaccagaatgagcacatt

SEQ ID NO: 40 - DNA, 57 bp, Unknown
  synthetic sequence
ccggcagcaccagaatgagcacattctcgagaatgtgctcattctggtgctgttttt

SEQ ID NO: 41 - DNA, 21 bp, Homo sapiens
gcagatcatcagggaacacat

SEQ ID NO: 42 - DNA, 57 bp, Unknown; identical to SEQ ID NO: 34
  synthetic sequence

SEQ ID NO: 43 - DNA, 3193 bp, Homo sapiens
gagggactctgagagaacgcccggccagggtgaacgccgcggcaggagagcacgggagattgtgaagagcatggggagcctttgtcgtgcagcgtgaaacccttgagcctttggcctaggagctgggagactcagggcccttctcacactcagaattggagcagggccttctagacagtcccagcaccatgagccctgaaaagtcccaagaggagagcccagaagaagacacagagagaacagagcggaagcccatggtcaaagatgccttcaaagacatttccatatacttcaccaaggaagaatgggcagagatgggagactgggagaaaactcgctataggaatgtgaaaaggaactataatgcactgattactataggtctcagagccactcgaccagctttcatgtgtcaccgaaggcaggccatcaaactccaggtggatgacacagaagattctgatgaagaatggacccctaggcagcaagtcaaacctccttggatggccttaagagtggaacagcgtaaacaccagaagggaatgcccaaggcgtcattcagtaatgaatctagtttgaaagaattgtcaagaacagcaaatttactgaatgcaagtggctcagagcaggctcagaaaccagtgtccccttctggagaagcaagtacctctggacagcactcaagactaaaactggaactcaggaagaaggagactgaaagaaagatgtatagcctgcgagaaagaaagggtcatgcatacaaagaggtcagcgagccgcaggatgatgattacctctattgtgagatgtgtcagaacttcttcattgacagctgtgctgcccatgggccccctacatttgtaaaggacagtgcagtggacaaggggcaccccaaccgttcagccctcagtctgcccccagggctgagaattgggccatcaggcatccctcaggctgggcttggagtatggaatgaggcatctgatctgccgctgggtctgcactttggcccttatgagggccgaattacagaagacgaagaggcagccaacaatggatactcctggctgatcaccaaggggagaaactgctatgagtatgtggatggaaaagataaatcctgggccaactggatgaggtatgtgaactgtgcccgggatgatgaagagcagaacctggtggccttccagtaccacaggcagatcttctatagaacctgccgagtcattaggccaggctgtgaactgctggtctggtatggggatgaatacggccaggaactgggcatcaagtggggcagcaagtggaagaaagagctcatggcagggagagaaccaaagccagagatccatccatgtccctcatgctgtctggccttttcaagtcagaaatttctcagtcaacatgtagaacgcaatcactcctctcagaacttcccaggaccatctgcaagaaaactcctccaaccagagaatccctgcccaggggatcagaatcaggagcagcaatatccagatccacacagccgtaatgacaaaaccaaaggtcaagagatcaaagaaaggtccaaactcttgaataaaaggacatggcagagggagatttcaagggccttttctagcccacccaaaggacaaatggggagctgtagagtgggaaaaagaataatggaagaagagtccagaacaggccagaaagtgaatccagggaacacaggcaaattatttgtgggggtaggaatctcaagaattgcaaaagtcaagtatggagagtgtggacaaggtttcagtgttaaatcagatgttattacacaccaaaggacacatacaggggagaagctctacgtctgcagggagtgtgggcggggctttagctggaagtcacacctcctcattcaccagaggatacacacaggggagaagccctatgtctgcagggagtgtgggcggggctttagctggcagtcagtcctcctcactcaccagaggacacacacaggggagaagccctatgtctgcagggagtgtgggcggggctttagccggcagtcagtcctcctcactcaccagaggagacacacaggggagaagccctatgtctgcagggagtgtgggcggggctttagccggcagtcagtcctcctcactcaccagaggagacacacaggggagaagccctatgtctgcagggagtgtgggcggggctttagctggcagtcagtcctcctcactcaccagaggacacacacaggggagaagccctatgtctgcagggagtgtgggcggggctttagctggcagtcagtcctcctcactcaccagaggacacacacaggggagaagccctatgtctgcagggagtgtgggcggggctttagcaataagtcacacctcctcagacaccagaggacacacacaggggagaagccctatgtctgcagggagtgtgggcggggctttcgcgataagtcacacctcctcagacaccagaggacacacacaggggagaagccctatgtctgcagggagtgtgggcggggctttagagataagtcaaacctcctcagtcaccagaggacacacacaggggagaagccctatgtctgcagggagtgtgggcggggctttagcaataagtcacacctcctcagacaccagaggacacacacaggggagaagccctatgtctgcagggagtgtgggcggggctttcgcaataagtcacacctcctcagacaccagaggacacacacaggggagaagccctacgtctgcagggagtgtgggcggggctttagcgataggtcaagcctctgctatcaccagaggacacacacaggggagaagccctacgtctgcagggaggatgagtaagtcattagtaataaaacctcatctcaatagccacaaaaagacaaatgtggtcaccacacacttgcacaccccagctgtgaggtggcttcagcggaagtctgctgaccccttatattccccgagagtataaagagatcggaaataactgattaaacaaatccgccactttcatgactagagatgaggaagaacaagggatagttctgtaagtgttcgggggacatcagcatgtgtggttctttcccgcactgatcccctccattttttgtttgtttttttgcctcctgttctaataaattttgtctccatacaaatctgaa

SEQ ID NO: 44 - protein, 894 aa, Homo sapiens
MSPEKSQEESPEEDTERTERKPMVKDAFKDISIYFTKEEWAEMGDWEKTRYRNVKRNYNALITIGLRATRPAFMCHRRQAIKLQVDDTEDSDEEWTPRQQVKPPWMALRVEQRKHQKGMPKASFSNESSLKELSRTANLLNASGSEQAQKPVSPSGEASTSGQHSRLKLELRKKETERKMYSLRERKGHAYKEVSEPQDDDYLYCEMCQNFFIDSCAAHGPPTFVKDSAVDKGHPNRSALSLPPGLRIGPSGIPQAGLGVWNEASDLPLGLHFGPYEGRITEDEEAANNGYSWLITKGRNCYEYVDGKDKSWANWMRYVNCARDDEEQNLVAFQYHRQIFYRTCRVIRPGCELLVWYGDEYGQELGIKWGSKWKKELMAGREPKPEIHPCPSCCLAFSSQKFLSQHVERNHSSQNFPGPSARKLLQPENPCPGDQNQEQQYPDPHSRNDKTKGQEIKERSKLLNKRTWQREISRAFSSPPKGQMGSCRVGKRIMEEESRTGQKVNPGNTGKLFVGVGISRIAKVKYGECGQGFSVKSDVITHQRTHTGEKLYVCRECGRGFSWKSHLLIHQRIHTGEKPYVCRECGRGFSWQSVLLTHQRTHTGEKPYVCRECGRGFSRQSVLLTHQRRHTGEKPYVCRECGRGFSRQSVLLTHQRRHTGEKPYVCRECGRGFSWQSVLLTHQRTHTGEKPYVCRECGRGFSWQSVLLTHQRTHTGEKPYVCRECGRGFSNKSHLLRHQRTHTGEKPYVCRECGRGFRDKSHLLRHQRTHTGEKPYVCRECGRGFRDKSNLLSHQRTHTGEKPYVCRECGRGFSNKSHLLRHQRTHTGEKPYVCRECGRGFRNKSHLLRHQRTHTGEKPYVCRECGRGFSDRSSLCYHQRTHTGEKPYVCREDE

SEQ ID NO: 45 - DNA, 6612 bp, Homo sapiens
actgccctcgcttcctgtgcgtcctcaggtcaccgcttgctctagttcccaggctttggcctccagtggacgagaatcgcggagcctgcggggctggaggttgagcgcccgggccagcacctaggcgggcgcgggggtgtgcaggccagggttcgcgcgggccgggtggaggcttgagcggggacccccgagcttgagccccggagccggcggcgctggggccagaggggccggacgggaggtggcggaggtggcggcggaggcgaaggggcggcgggacgcgggcctggcccgtgtgtgtcctggcggcctggcccaggctgccgctgtacggtgagcccgagggaggcggatctgggtcccgggaaggacacccgcctggatttgccccttaggcccggcccgggcccctcgggagcagaacaaccttagtgaggtggacaggaggggacctcgcgagcagacgcgcgccagcgacagcagccccgccccggcctctcgggagccgtggggcagaggctgcggagccccagaagggtctaccagccacagtctctgcacgtttccaagagcagcagaaaatgaacacattgcaggggccagtgtcattcaaagatgtggctgtggatttcacccaggaggagtggcagcagctggaccctgatgagaagataacttacagggatgtgatgttggagaactatagccatctagtttctgtgggatatgataccaccaagccaaacgtcatcattaagttggagcagggagaggagccgtggataatgggaggtgaatttccatgtcaacatagtccagaagcctggagagttgatgacctgatagagagaatccaagaaaacgaagacaaacattcaaggcaagctgcttgtatcaatagcaaaaccctgactgaagagaaagagaatacatttagtcaaatttacatggaaacaagccttgttccttcaagcataatagctcataattgtgtctcatgtggaaagaatttagaatctatttcgcaattaattagtagtgatggaagctatgctaggacaaaacctgatgagtgtaatgaatgtgggaaaacatatcatggagagaaaatgtgtgaatttaatcaaaatggggatacctattctcacaatgaagaaaatattcttcagaaaattagtattttggagaaaccctttgaatataatgaatgcatggaagccttagacaatgaggctgtttttattgctcataagagagcttacataggggagaagccctatgagtggaatgattctggaccagacttcatacagatgtcaaattttaatgcatatcagagatcacaaatggaaatgaagccctttgaatgcagtgaatgtggaaaatccttctgtaaaaagtcaaaattcatcatccaccagagggctcacacaggagagaaaccttatgaatgtaatgtatgtgggaaatccttcagccaaaagggaaccctcactgtacatcggagatcacacttagaggagaagccctataaatgtaatgaatgtgggaaaaccttttgtcagaagttacacctcactcaacacctaagaactcattcaggagagaaaccctacgaatgtagcgaatgtgggaaaaccttctgccaaaagacacatctcaccctgcaccagaggaatcattcaggagagaggccctatccatgtaacgaatgtgggaaatccttctcccgcaagtctgctctcagtgaccatcagagaactcacacgggagagaagctttataaatgtaatgaatgtgggaaatcctactaccgaaagtctactctgattacacatcagagaacacacacgggagagaagccctatcagtgtagcgagtgtgggaaattcttttctcgggtgtcatacctcactatacattatagaagtcatttagaagagaaaccctatgaatgtaatgaatgtggcaaaaccttcaatttaaattcagccttcattagacatcggaaagtacacacagaagagaaatcccatgaatgtagtgaatgtggaaagttctctcagttgtatctcaccgaccatcatacagctcatttagaagagaaaccctatgaatgtaatgaatgtgggaaaaccttccttgtaaattcagccttcgatgggcaccagccacttccaaaaggggagaaatcctatgaatgtaatgtatgtggaaagttattcaatgagttgtcatactatactgaacattatagaagtcattcagaagagaaaccttatggatgtagcgaatgtgggaaaaccttttcccataattcatccctcttcagacatcaaagagtacacacaggcgagaaaccctatgaatgttacgaatgtggaaaattcttctctcagaaatcatatctcactatacatcatcgaattcattcaggagagaaaccctatgaatgtagtaaatgtggaaaagtcttctctcggatgtcaaacctcactgtccactacagaagccattcaggagagaaaccctatgaatgtaatgaatgtgggaaagtcttttctcagaagtcatacctcactgtacactatagaactcattcaggagagaaaccctatgaatgtaacgagtgtgggaaaaaattccaccacagatcagccttcaatagccatcagagaattcatagaagaggaaatatgaacgtacttgatgtggaaaatctctgaagtcagatctcaatttttagaaaactctctgaatataatgaatatggggaatccaataggaagtcaaagcgtttatctgagagttcgtgttcctgaacggtgagaagcatttaggcattagagtcattttaatccaaattttcacagagaagaatcccgaagaatgtaacaagaagcaaagccttcagcaagatcatacgactcatcggacactaatttatataggagtgaagttttataaatatttaatatttattttggattcaaattgtatttacatatcagggaatcatacaaaggcaaaatctgtcaatatggtgaatgtggaaaatatattgtcttggaaatttgttgtaaaagccatatttctaatggaaaatcaggtgtttacaggaaagatctcagaggctatgagctctgaataaatcttcattgtataaaatgaagtttttaaattgtcaggagttgatcatgaggacagtagcattaaataagtatatggccgttttttatcatgtcttaaaaatgcaatctaatggtaattctatgcaagtttggaattggatgacttgtgaagaggcagttttcttatttgagtattaggatggcaaaatgtattaagacaggacatattgttggtgagataatatttaataggtataaaatggtaaaatacctagttttctatttagaggaatttacaaatgggtttttaacaaatgcctcattagtacaggaggcagtcgttttgtaaagttttcaactgcatctgagtaagataagattttctaaaagactattttgataaactatacatacataatttggaattgtttaagtctatttcagtgaaagagaacaagcatactgcccatactctaaaatatccccagctctcacaccacccttgttttttaacccataggtttgagtgtgcctagtgccaatattttgtaatttagaaattttattcacaaacttctgtttggtacaaatacagtgtcattgttttgtgcattctcctttttcccagtatttcagaacaaattgattcaagtttctagcagatattttttgatcaattaacttaatgtcctcgctccatttcttgctggaacagtttaggtacctaccacttcttcacatgacacaggggaatcctgattagtcaaaataataatgatttcattctctttgccagtaacttgttttatagtggtcatatgacctgatactgggtaaacaaaacaaagatggacttgttctgggaaaaggtaaaatggtaatcaaatagattgtgttccaggaatgcaaaggtggcttaatattcacaagtcagttgctattatacaccacctgtagaaaagtaatctggcatgcagaacattcttgtggtacaattaatgttcgtttatgatcttagcaaatgatggattgaaagggacttacttaactgcataaagagacttaaactacaacaaacaatatgcttaatgatgaaatagtgaacatttctcctaagattataaaaataagacaaggatatctgctgtcaatgattttattcggcattgttcagaaggacctaaccagaaaactaatgcaaggaagagaaacaaaaggcatagagattagaaaagaagtaaaactttaaaaacgaaaaagaatataaatctctatttgcagatgccatgagtaaatttggtaagttccctgcataaaagttatgcaaaaagcattttatgatataccagcaaaaaacatggaaaatgaaattttgaaaagcaatgccacttcaaagatccctcaagtgcctagagggagaaaatgagttaatatgctttgaagaactgtatccagaaaataaaattacaaaggaggagagggataggattccaggacaatctcaaaactattgctttttcctaaattcattgcaaccttaaaatcctagcaagttctttaatgtaaattaacaagctaattctagaattcatatgcatattcaaaagtcgaataattgtcaaggctatcctgtagaatggacagagaggattgaaatttctaaatatcaagacctgttataaagccatagaaataatgaaggtgttaatttggcacaaggatgaaaaaactgactagtggaacagcatacagattcaaaagtagacccacgtgtataccatcacctgagttttgagaaaggtgacattgaagtgtagtgggggaaagggtgttctttccagtaaatgtactttgccaataaaattttgtaatttgataaaaagttatttggaggtggattgcagatctgaatatgaaatgtgaaagctttacaaagaaatcttaggacagtttgtaatcttggagtaagcaaaggtttattgagacccaaaaagcattaacccataaaattagaacttaatattaaatttgagaacttctatttatcagaaagaccaccagtaagaaaatgaacaggaaatcatggggaggagaagatatttgcagttcatgtatgtgacaacagcaccgagtatagcagaagtgttggcaaactttataaagcaaggcaccagatggtgaaaattttcagctttgtcacaactgctcatctttgctattgtgtgaaagcatccatacaccatgcattaaaaaaaaaatgagcatggctgcttcccagtaaaaccattcacaatcccaggtggcagtctggatttggtctgcactcatagttttctggtccctgatctcgaatatgtaaagagcacctacaaatcaacaagggggaaactggaaaaggcaaaagactttagaggatatccactcactttagaggatatccagacggccaataagcatgaaaagatgtgttagctttattagtaatcagggaaatgcaaacttaaaacatgtagcactgctacccatccatggaaatggttaaaatgaaaagcatgaaaaagcatcacgttttggcaaggatgtaagcaagaggaactgtacactactggtggaattgctcatcgataaaaccattttgaaagctggcactaaaagccaagcatatgtatactgttttacccaaacccagcaaaaatgcatgtgtctgtccaccaaaggacatgcactagaatatttatagcctaaaactgcacaaaacagaactatcttaaggcacatgtgcaatggaatgaataaagaagtggcatatgtccatggaatactgtaaaacagtgagcatgaatgaactagaagtccgtgtaataacgcagctgaatttaacaaaccttgctgaatgaaagactccagacacaaaagccaacatgctgtatgattccttctatataaattataaagacgggcaaaacttgtatacgtggtttaaaattagggtagcagttagccttggccaaggctgaaagggggcatttatctggtgctgggaataatctgtttctaaacctaggtgctaagtatttgagtgtgttttgagctgtgcacttaagatatgtgtatttttctgcatgtgtgttaaactttccataaaagttttctaaaatcacaaatggctaacatttgtgtcgctcatcactctaatcatatttttctagatgtgtatgaatatgctgcacaacaggaattaaatggcagattttgcataattctgtgcaggaaatacatatttatagtaattttgatggcaactactaagatttcctacgctgtccttaaagcttagcataatgtatattttaagtgaaatatttgagaaggttaaagaatcattacatactttgtcatcctatacttttgcatatataaataggtctgagctgcctcttcaataaagaagctaatgtgtaacatttcatatttccctaaa

SEQ ID NO: 46 - protein, 714 aa, Homo sapiens
MNTLQGPVSFKDVAVDFTQEEWQQLDPDEKITYRDVMLENYSHLVSVGYDTTKPNVIIKLEQGEEPWIMGGEFPCQHSPEAWRVDDLIERIQENEDKHSRQAACINSKTLTEEKENTFSQIYMETSLVPSSIIAHNCVSCGKNLESISQLISSDGSYARTKPDECNECGKTYHGEKMCEFNQNGDTYSHNEENILQKISILEKPFEYNECMEALDNEAVFIAHKRAYIGEKPYEWNDSGPDFIQMSNFNAYQRSQMEMKPFECSECGKSFCKKSKFIIHQRAHTGEKPYECNVCGKSFSQKGTLTVHRRSHLEEKPYKCNECGKTFCQKLHLTQHLRTHSGEKPYECSECGKTFCQKTHLTLHQRNHSGERPYPCNECGKSFSRKSALSDHQRTHTGEKLYKCNECGKSYYRKSTLITHQRTHTGEKPYQCSECGKFFSRVSYLTIHYRSHLEEKPYECNECGKTFNLNSAFIRHRKVHTEEKSHECSECGKFSQLYLTDHHTAHLEEKPYECNECGKTFLVNSAFDGHQPLPKGEKSYECNVCGKLFNELSYYTEHYRSHSEEKPYGCSECGKTFSHNSSLFRHQRVHTGEKPYECYECGKFFSQKSYLTIHHRIHSGEKPYECSKCGKVFSRMSNLTVHYRSHSGEKPYECNECGKVFSQKSYLTVHYRTHSGEKPYECNECGKKFHHRSAFNSHQRIHRRGNMNVLDVENL

SEQ ID NO: 47 - DNA, 5826 bp, Homo sapiens
attctggcgccgctgactcccagggctgggctatcctctgagtcgggtggcggttagttggggccagggaagcgtggagggtgggttccaatcgagtcaagaaaagcctggggtgtcctgaactctgcctgcttccccagccctgccagtttccagagaaggcgcttgagaaggagaaacgaatcgctgctgctcttctaaaagccggttccctctctggtgtctgtggaccctgcttctgaagtacatgaaccttgaggaaaattgaccagttctagcagttctaaaatcatggctcgtgatttggtgatgttcagagatgtggctgtagacttttctcaggaagaatgggaatgcctgaactcatatcagaggaatttgtacagagatgtgatattagagaactatagcaacttggtgtcactggcaggatgttctatttctaagccagatgtgatcaccctattggaacaagggaaagagccctggatggttgtgagggatgagaaaagaagatggactctagatttggaatccagatatgacactaaaaagttatttcaaggaaaggatatttatgaaatgaacttatctcagtggaaggtaatggaaagaattaaaagctgtggacttgaagaacaagaaagtcctcatgaggtgtgtttcaggcaagtgacaaaaaccacctctgaaaaaatgcctacttacagaaaactcacatctcttcctctgtatcagaaaagtcataacagagagaaaccctacgaatgtggggaatgtgggaaggcttttagagtacgacaacaacttactttccatcaaagaattcatactggtgagaaaccctatgaatgtaaagaatgtggaaaagcctttagacagtgtgcccacctcagtcgacatcagagaattcatacttctgacaaactctatgaatgtaaaaaatgtggaaagatcttcacatgtggctcagaccttcgagtacatcagagaattcatattggtgagaagccgtatgaatgtaaagaatgtgggaaagcctttagagttagaggacaacttaatctccatcaaaggattcacacgggtgagaaaccctatgaatgtaaagaatgtgggaaggcctttaggcagtatgcacaccttactcgacatcagagactgaacattgctgagaagtgctatgagtgtaaggaatgtggtcaggcctttctgtgtagtacaggccttcgactacatcacaaacttcatactggagaaaaaccctatgaatgtaaggagtgtggaaaggcctttagagtgcggcagcaacttactctccatcagagaattcacactggtgagaagccttatgattgtaaggaatgtgggaagactttcagtcgtggctatcatctaactctccatcagagaatacatactggtgaaaagccctatgaatgtaaggaatgtcagaagttctttcgtcgttactcagaacttatttcacatcagggtattcacattggagagaaaccttatgaatgtaaggaatgtgggaaggcatttaggctgttctcacagcttactcaacatcagagtattcattttggtgagaaaccctttaagtgtaaggaatgtgagaagacttttagactgctttcacaacttacccaacatcaaagtattcatactggtgaaaagccctatgactgtaaggaatgtggaaaggcctttagacttcattcatcactgattcaacatcagagaattcattctggtgagaaaccatacaaatgtaaggaatgtaaaaaggcatttagacaacattcacatcttacttaccatcagcgaattcataatgtaacttaataattattagaactcttcctttgcgaattttatgttgagcataggaagtacattctagaggaaaggtttttgaacgtgggaatcccttttgcttcatgctcacaactaagcataggaagttttatttaaaggaaagaatatgttaatgaacatatagaagcctttcatcacctttgaaaccatgttaaactttaggaaattcatcctagaaaagaactttattacaggactgaatgtggaaaagcttttgatcttacctattattatctccatattcttccatctgtgtatatacacacgaaggttgctagggaaccacttcattctgaaaatgtgtaaatgaaaggaaagtcatttagtctgcatttcctgtaggaactgtatttcagggcaaccagaagttaaggaggtaaagttcttctttattagaaaattccaggctaatgaatgcagaaagaataatagaaaattatattagaaaaactattgtgtaacacataatgaaataatggatctaggcatgattctctgtacaggttgacaccattcagtgaaggttgtgaactttatagtgaatagatgagactgacaacgtctgaacccactcatcatctcaacttcacaaaaagcaagagagtaaaaattacgtgcctcctaatgtgctacagtaagatatacacatcttgccaaaaatattgaacctgaatttaagcctcaagagccaactcccagtttagagaaaattcaaggaatggaagagtaaattacatgacacaaaaaggagcaattaaatctaaaataagggtaattctacaagaggaatcacctggtttcccaaccaataaaatggcattttaagaaataaggtggaactcctaggtattgacagacttgagacatcagtcaaatgcaatgaaacagtggtttttacttagatcatgagttgaacaaacatgtaaaagaagagatacttaacaataattgggagaatggaatattgacaatattagataatattaagaaactttgttatgtgtgataatagcattgtggttatgtaaaagtgtatttgttagagataatttctgaagtctatacacaggagatgatatatctggaatgtccttttgttcatacaaaagaaaaatgaggatgaataacaagtttggcaaaatgatggtaacctaagtcttggatacatggtttttatttgttttgtttttgctattctacttttgtgtatttaaaattttccatgatgttcttttaaagatcaaattatccatgaaattatagccagtttaaaatgaattattttaaaaaaaatttctggctgggcccggtggctcatgcctgtaatcccagcactttgggaggccggtgggcagatcatgaggtcaggagttcgagaccagcctgaccatcatggtgaaacctcatctccactaaaaatacaaaaattagccaggcgtggtcacatgcgcctgtaatcccagctactcgggcagctgagacaggagaatcacttgaacccaggaggcagaggttgcagtgagccgagatcacgccattgcactccagcctgggcaacaagagcaaaactctatctcaaagaaaaaaagaaaatttctacatattaaaacttgtggatgttgccaaagctctacacattgggattggaatattaattacactataatgacgataatgtattcaggaagttaaaatgtaggtccacattttatttagttgacctctctatctctatattatagtacccatggtatgcaccttttttttttttttttttgagacggagtctcgctctttcgcccaggctggcgtgcagtggcacagtctcggctcactgcaagctctgcctcccgggttcaagccattctcctccctcagacttccgagtggctgggattacaggcgcccgccaccacaccaggttgatttttgtatttttagtagagatggggtttcaccatgttggccaagctggtctcaactcctgacctcaggtgatccacctgccttggcctcccaaggtgctgggattacaggcgtgagccaccatgcccgactctcacttcatatgtttaaagaatgagtaaaagaaagcaattactactgctaaatgtgggaaataatggactagacctgtactaatatatggtagtcactagcaacctgttgagcacttgaaattgagttattgagcactgaaatgtggctagtccaaattcaaatggtgtttttttgtaaaacacaagattctgaagacttagttattttaaaaaagttaagtatctcaatttttcatattgagtacatattgaaataatattttagatatattggttcaaataaaatacattaaaatgaataacacttttttgtttttaaaattgttataggaaaatttatatatgtagctcacgtatttctattgtcagcgctggcataaacaataaaaagtagacttggtttttttgtgtgtgtttctttaaaagataccaatatagtcaagacctttgcagttttgatcacagaaatatgaaagattacacagctacagctatatgaatgataaaagtgacagctatggatttttaaagttataagttgctatactacatatatgtaatgtgtgtgtgtatagtgtgtaggtatatatatttatatttatacacacactatacatgtattttaaaatattgaaaatccagaattattttatggtaaaaattactaaaattgacttcacatgctgaatgaagagagcctgagtagaccaacaaacaaatgaaaaattaagacggttagaagatacgctttctaaaagaatacatttagaatctaactttaaaaaaaaaaaatcctactctcctgagccagagtggtctcagagagactccgagaacctaattttttacaagtaaaatctttgaagaattggtaattgctaaatttttccaacatactattctacaagactaacctaaaactgattataagaactaggtgaggagggctggcaaaacgaaaatctagacattttccgtatgaagagaaatctggtaattctaatttctatgggaaattatatccaacagtttagaatagaaaatcatttatgtggaataacttggaccagatccatccagctttaattatatatttagattctaggcattctaccttcagaacatcataatgatagtaaaagagatacgattctggcccagtatcatctcaattcatgcttattgtcttttttttttttttttttttagctttctatgtattaagaatggaatgaattttatgtatgtaaaagtgtaacccaacaccttaaaattaccttctcaaaattaataaagacagagttcttataaatgattgcatcagttggacttcggtgatttcaccgtggtcatccattatgaactgtatttgctgttataattgggaagccatgatgttcagtgtattacatcattatattccatttctcaaatggaatatgaaacttgatagcatttgaaaccatttcccaggaaacactagtgcttgatggtatttttagaaagcattctgtggttaaatgagcatattaaaattaataattaagaaaataaaactatagcttctccaaataatgaagtaatgagagtttaattgattttatttaacttaatgtatctgaagcaccttttaccctgtaactttcactcttaatgcttgtgagtatgggatatgaacccattttaacagataagtgctgtaaccaaaacaggtgacagcaaaggtggaaagttcggacctcatgtcaggtggttagttgtgttggaaggtggatgtgaggtatgtttccctggatgtggcatcatgttctaaagtcacctgttctttctgaatattgaactgttgcttttctgcagaaataaaatttctgaatcaacacta

SEQ ID NO: 48 - protein, 519 aa, Homo sapiens
MARDLVMFRDVAVDFSQEEWECLNSYQRNLYRDVILENYSNLVSLAGCSISKPDVITLLEQGKEPWMVVRDEKRRWTLDLESRYDTKKLFQGKDIYEMNLSQWKVMERIKSCGLEEQESPHEVCFRQVTKTTSEKMPTYRKLTSLPLYQKSHNREKPYECGECGKAFRVRQQLTFHQRIHTGEKPYECKECGKAFRQCAHLSRHQRIHTSDKLYECKKCGKIFTCGSDLRVHQRIHIGEKPYECKECGKAFRVRGQLNLHQRIHTGEKPYECKECGKAFRQYAHLTRHQRLNIAEKCYECKECGQAFLCSTGLRLHHKLHTGEKPYECKECGKAFRVRQQLTLHQRIHTGEKPYDCKECGKTFSRGYHLTLHQRIHTGEKPYECKECQKFFRRYSELISHQGIHIGEKPYECKECGKAFRLFSQLTQHQSIHFGEKPFKCKECEKTFRLLSQLTQHQSIHTGEKPYDCKECGKAFRLHSSLIQHQRIHSGEKPYKCKECKKAFRQHSHLTYHQRIHNVT

SEQ ID NO: 49 - DNA, 2217 bp, Homo sapiens
gtattcgtctctttgtgcttcctgacatgtgcgcggtgctttgaattttgtgggctgtgtctgcccaccgtctccgtgtatcttttggaaacattttacagtgatccatatatgttctagcgttctgccctatgactgagcctccttagtcctttgctgattctaatgtcttctgctcagcatctgcaggggctgctgagagtaaatacttggcgcctccagctgctggccaaggagacagatggagctcaagttgggagatacgccctgagagccgatgatagacacaagtccagatctcggattttgatactgtatgttccctgggttcctgagagaggacattgaggagtaggagtcggcgattaaggagatcggtacaattgggaagcctcctgtcagagcttccagcaatttcctcatcagaggtggacaagccctatgggctaagacagagggtcctcagaaaggagtgcggacgccgtcatgctgcagcagctcctgatcaccctgcccaccgaggccagcacctgggtgaagttgcgtcatccaaaggcggccacggagcgggtggccctgtgggaggatgtgactaagatgtttaaagcagaagctctgctgtctcaggatgctgatgagacccagggcgaaagtttagagagtagagtgacccttggatccctgacagcagaatcccaggaactgttaaccttcaaggacgtatctgtggacttcactcaggaggagtgggggcagctggcccctgctcaccggaatctgtaccgggaggtgatgctggagaactatgggaacctggtctcagtgggatgtcagctttccaaacctggcgtgatttcccagttggagaaaggagaagaaccatggctgatggagagagatatttcaggagttccaagttcagacttgaagagcaaaacaaaaaccaaagagtcagccttacagaatgatatttcgtgggaagaactacattgtggcctaatgatggaaagatttacaaaaggaagcagcatgtattccaccttgggaagaatctccaaatgtaataagctagaaagccaacaagagaaccaaagaatgggtaaggggcaaatccccctgatgtgcaagaaaacattcactcaggagagaggccaagagtctaatagatttgagaaaagaattaatgtgaagtcagaagttatgccaggaccaataggtcttccaagaaaaagagatcgtaaatatgacacacctggaaagagaagcagatacaacatagatttagttaatcattcaaggagttatacaaaaatgaaaacctttgagtgtaatatttgtgaaaaaatcttcaaacagcttattcaccttactgaacacatgagaattcataccggggagaaacctttcagatgtaaggaatgtggaaaagcctttagccaaagttcatctcttattccgcatcagagaattcatactggtgagaaaccctatgaatgtaaggagtgtgggaaaaccttcagacatccttcatcgcttactcaacatgttagaattcataccggggaaaagccctatgaatgtagggtatgtgagaaagccttcagccagagcattggactgatccagcatttgagaactcatgttagagagaaaccttttacatgcaaagactgtggaaaagcgtttttccagattagacaccttaggcaacatgagattattcatactggtgtgaaaccctatatttgtaatgtatgtagtaaaaccttcagccatagtacatacctaactcaacaccagagaactcatactggagaaagaccatataaatgtaaggaatgtgggaaagcctttagccagagaatacatctttctatccatcagagagtccatactggagtaaaaccttatgaatgcagtcattgtgggaaagcctttaggcatgattcatcctttgctaaacatcagagaattcatactggagaaaaaccttatgattgtaatgagtgtggaaaagccttcagctgtagttcatcccttattagacactgcaaaacacatttaagaaataccttcagcaatgttgtgtgaaatatactaaacatcaaagaatctatgttggagcacaagattctaaatcagtggttccctgatccctcaaaaatccatttgtttttggatttccaaaaacgaacattaaaaaaaaatggtttggca

SEQ ID NO: 50 - protein, 534 aa, Homo sapiens
MLQQLLITLPTEASTWVKLRHPKAATERVALWEDVTKMFKAEALLSQDADETQGESLESRVTLGSLTAESQELLTFKDVSVDFTQEEWGQLAPAHRNLYREVMLENYGNLVSVGCQLSKPGVISQLEKGEEPWLMERDISGVPSSDLKSKTKTKESALQNDISWEELHCGLMMERFTKGSSMYSTLGRISKCNKLESQQENQRMGKGQIPLMCKKTFTQERGQESNRFEKRINVKSEVMPGPIGLPRKRDRKYDTPGKRSRYNIDLVNHSRSYTKMKTFECNICEKIFKQLIHLTEHMRIHTGEKPFRCKECGKAFSQSSSLIPHQRIHTGEKPYECKECGKTFRHPSSLTQHVRIHTGEKPYECRVCEKAFSQSIGLIQHLRTHVREKPFTCKDCGKAFFQIRHLRQHEIIHTGVKPYICNVCSKTFSHSTYLTQHQRTHTGERPYKCKECGKAFSQRIHLSIHQRVHTGVKPYECSHCGKAFRHDSSFAKHQRIHTGEKPYDCNECGKAFSCSSSLIRHCKTHLRNTFSNVV

SEQ ID NO: 51 - DNA, 5941 bp, Homo sapiens
aggccccggggattgtggcgtgacccggcagcggcttcctccgttcgggcatcgctgtgcctcgggttcgcgccccgagtgagcagtcctggcccggagcgtcggtcctggtaatctgtaggaaaagcgctgcggcccagggggtaaagagagatcagcctctgtggactcggtgcttctcctggcaagtaaaccccaaggaggactgaccagttcttgaatttctataccatggcccttcgatcagtgatgttcagtgatgtatccatagacttctctccagaagagtgggaatacctggacttggaacaaaaggacttgtacagagatgtcatgttggagaactacagcaacttggtctcactgggatgcttcatttctaaaccagatgtgatttcctcattggagcaaggaaaagagccttggaaagttgtgaggaaaggaagaagacaatatccagatttggagaccaagtatgagaccaagaagttatctttagaaaatgacatttatgaaataaatttatcccagtggaagataatggaaagaattgaaaaccatggccttaagggtctcattttaaaaaatgattgggaatccacaggaaaaattgaaggacaggagagacctcaagaaggatacttcagtagtgtgaaaatgccatctgaaaaggtgtcctcttaccagaaacgcacatctgttactccacatcagagacttcattttgttgataaaccctatgaatgtaaggaatgtgggaaggcgttcagagtgcgccaacagcttacttttcatcacagaattcatactggtgaaaaaccgtatgaatgtaaggaatgtgggatggccttcagacagactgcacaccttactcgacatcagagacttcattctggtgaaaaactctatgaatgtaaggaatgtggggaagctttcatatgtggtgcagatcttagagtacatcagaaaatgcatattggtgagaagccctatgaatgtaaagaatgtgggaaggcttttagggtacgaggacaacttactctgcatcagaggattcatactggtgagaaaccctatgtgtgtaaagagtgtggaaaagcctttagacagtacgcacacctgactcggcatcagaagcttaatagtgctgacaggctctatgaatgcaaagaatgtgggaaggcctttttgtgtggctctggtcttagagtacatcacaaacttcatactggtgagaaaccctatgaatgtaaggaatgcgggaaggcctttagagtgcgacaacaactaacactccatcagagaattcatactggtgagaaaccctatgaatgtaaggaatgtggaaagacctttagccgtggttatcatcttattctccatcacagaattcatactggtgaaaaaccttacgaatgtaaggaatgctggaaagcctttagtcgctactcacaacttatttcacatcagagtattcatattggtgttaagccctatgactgtaaggaatgcgggaaggccttcagactactttcacaactcacacagcatcagagtattcatattggtgagaaaccttataaatgtaaggaatgtggcaaggcctttagattgcgccaaaaacttactctacatcagagcattcatactggcgaaaaaccctttgagtgtaaggaatgtaggaaggcctttagacttaattcatcccttattcaacatctgagaattcattctggtgagaaaccctatgaatgtaaggaatgtaagaaggcctttaggcaacattcacaccttactcatcatctgaaaattcataatgtaaaaatctaagaaagtcttttcaacttctgtgttatagaacattctatgaatgtagtaattaatctattttgctccatacatgcaactgcgttggcattagaggttttataccattaaaagagtgtgacaatgtattgtagtccatcatcactcaaacctgaaacttcagcatatttgttctaaaaactaatcctgttataagaatgaaaaagacatttaccgtcatccctatcccatcactttgtgtcatactggacaagacgcttaactgctctgtgctataattttttaatttatgacatggtcatataagagtgcagcagtttgacacactttcaatcaagaggtggaatctacatccctctgttgtatacaggaatctacatccctctgtgactgcttcgcccagtagaatatggtagacgtactgctgtgctggtttcttgactcagactttactggtagggttacttcatctcatgaaatgacagaactgtcttgttacaaagtctggctactttgctgaagagaccacatgaagaggccctgaaactacgtagagagggagaggcacctgctgaaccctgtcttcttgacatccaccaagataccagacatttgagtgaaattttggatccaccagaccagccaccagctaaatgccagtgagcgacttggtaacctgaactgatgccatgtagaatggaagaattgaccagctgagcccctggcccaaatttctgacccacaaaaacatgagatataataaaatggttgttgttttaagccactaaactttcttttattatcatactaaatatttatttttacataattcatactaaaggctgtgggcataatgagtatagaaatgccttccaccaacatttaatcttcattgaacttgagatatcttattctcgttaaaatattgaaagtaaggaattcctttccagtttgttcattaaaaaacagataccctagaccaggtgaggtggcccatgcctgtaaatccagcactttgggaggccaagtaaggacgattgcttgaggccagaagttcgagaccagcctgggcaacatggtgagaccctgtctctaccaaaaaactttaaaaattagctgggcataatggtgcatgcctgtagtcctagctactcgaggctgaggtgggaggatcatttgaacccaagagttgaggcttcagtgagctgtgattgtaccactgcactccagcttgagtgactgcaagaccctgtctcaaaaaaaaaaaaaaactacaatcagtattctctggccccagtcaatattaaaaattgacaaaggataacatgaaactttggaaattaaaagtcacctgtattatgaagccccattaattttttaaactacttcattgttttttaaaaatgctaaattgtcaatttagcattttgaggcaatcccctcaaattggctcctgtgtccttttatcatgaccactccaacctttgagcttttttttttcctgaaccaaatgcattgattagttatggagcatactagagcattattaacaaataaaggaaaagaatggaatatttaccttgcctatcctttacaaactatatttcaagacaaccaaaagttggtgaaggaaagttgttgattagagaattccaactggttaaaaggtcaaaggaggccaggcgcggtggctcaagcctgtaatcccagcactttgggaggccgaggcaggtggatcgtgaggtcaggagatcaagaccatcctggctaacacggtgaaaccccatctctactaaaaatacaaaaaattcgccgggcgtggtggcaggcgcctgtagtcccagctactcaggaggctgaggcaggagaatggcttgaacccgggaggcggagcttgcagtgagccgagatcgcgccactgcactccagcctgggtgacagaccgagactctgtctcaaacaaaaaacaaaaaacaaaacaaaacaaagatcaaatgaatgatagaatttgaaaactacgctctttaattttacaaaatcatggattttcgtggtgatagcaatggatgcgaagaccattaggtgaaaaatggataggaagcttataatgcatggagcagaatgacaggacactaatctatattaacatctctaaatgagatcagccagatgaacttgatgtgatgaaatggatacacacagtggacacctgtgaagttttcttggctcccccaaaactgagaagtacaagttagtctccaaacctaattaccagtttacaggaaacatggggaataaaagaacaaattaacaacacaaagaagcaaacaaccaaatgcacaatttgggaaattctgcagaagtaatggcctagttttttaaccaatacatgtcaaaaaaaaaaaaaaaaaagacaaaaatggaatcctacactttaaaggagactaagaaacgtatccttcaaatacagtgtatggagcattttaggatccttgtgttaaaatgcgcttgggatttgttttaatcaatcatggtgagacaggcagacatggaaattattgtcatgaaggaagaagtttatacgcagatcccacaaacgggaggcatggcatggcatgcagggtcacgtaaagaagcacctgggtgtatcaggaggcagagggtgagagcacagcatggcccagagcttttattgggggttttcatgggaaggaatggacaaggcaggggtaggcacactggtaagcttaggattgaatagtttgagtaattttgttggtctctgggatctaggggggattcgtaattgtctagttagggcaggggaatattgaattggtgtatgagagtttggtaaaggagatagttgggagtatgggctctggattggttggtttgtatatgaaaggcatgcttgcagtggagtttatcatctatgcattagcttgccctgggaggggcagcctatccaggatcaaggccccaagtggccagagcatcaggaatacagaaaataaagaaaacatagtcaatacaagatttgaaggaataaaatgtctctacatattgtacaaatgtaaacatggattggttactaaatgatacgaaataatttattgttcatatgttaggcatgactatggcattatgggtatatgtgtatgagtccttaagtgttagagattcatactgaggtatttaaggctgaaatgttatgcctgtgatttacttttaaatacttaaaaacaaaaggtgggagggatagatgaaacaagattagcaaaatgttggtaaatgtttaatctggatcattaggtacacagggttcattgtgccgttcttactatctttacatatattttaaattttccataataaagttttttaaagtagaaaatcaagtttgggccaggcgtggtggctcatgcctgtaatcgcagtactttgggaggccaaggtgggtggatcatttgaggccaggagatcaagaccatcctggccaacatggtgaaactctgtctctactaaaaatacaaaaattagctggacatggtggcacgcctgtagtcccagctactcgggaggctgaggcaggaaaatcgcttgaacccaggaggcggaggttgcagtgagctgagatcacaccactgcactccagcctggcaatagagtgagactccatctcaaaaaaaaaaaaaaagaaagaaaatcaagtctgaaattgtagactatttagtgatgaatgatcacatgttgcctacagataacttgggggaaatcaccaaccaaagctctacttggtagaaaatttaaagcaatgcatttagaacatctggattgagaaataagtatttgtgttgttcaccattctgttcacacacctacagtgcctgtcacataacaggcaatttatgggaaaaaataaggattaacttaagctagaaatttttaaaaactaaggtgaataacagcaagtagtttatatgatcaaataaattaatggaatagttaataaaataacagactaaggatattctctttgaaaagaacattaatatagaattggcagttattgagggaaaaacatgactcacagctttatgtatggaaaaag

SEQ ID NO: 52 - protein, 532 aa, Homo sapiens
MALRSVMFSDVSIDFSPEEWEYLDLEQKDLYRDVMLENYSNLVSLGCFISKPDVISSLEQGKEPWKVVRKGRRQYPDLETKYETKKLSLENDIYEINLSQWKIMERIENHGLKGLILKNDWESTGKIEGQERPQEGYFSSVKMPSEKVSSYQKRTSVTPHQRLHFVDKPYECKECGKAFRVRQQLTFHHRIHTGEKPYECKECGMAFRQTAHLTRHQRLHSGEKLYECKECGEAFICGADLRVHQKMHIGEKPYECKECGKAFRVRGQLTLHQRIHTGEKPYVCKECGKAFRQYAHLTRHQKLNSADRLYECKECGKAFLCGSGLRVHHKLHTGEKPYECKECGKAFRVRQQLTLHQRIHTGEKPYECKECGKTFSRGYHLILHHRIHTGEKPYECKECWKAFSRYSQLISHQSIHIGVKPYDCKECGKAFRLLSQLTQHQSIHIGEKPYKCKECGKAFRLRQKLTLHQSIHTGEKPFECKECRKAFRLNSSLIQHLRIHSGEKPYECKECKKAFRQHSHLTHHLKIHNVKI

SEQ ID NO: 53 - DNA, 7437 bp, Homo sapiens
agcgccccccgcgctctccgcgggccgagtggacgaggccgaacgcgagcagcctgccgctgccccctgcgagccctggcttcgccccgcagctcttctcccttccgggcggaacagtttttgcggcctttcctcggcggcagcggtttcctcaggacggtcggggccgtcgtgggcccgaaagagcccggcgccgctctcggaatccggcggccccagcggcacccgcggcggcctggacgtgctgcggtgacccgagcccggaacctggcgccgggcggggcctgcacatccggccccacccactcggggactcgcctctccgcgcccgacccgggagtagcggacacaccccctcccggcccggctgtccgcctccgcccagcctttcctcagcctgcttcatttttctcccagtcgtccagcctcccggtttccgactttgcactaagagggatgcactctggaaaaccacattgcgcggtcacatcttgtttggagaagaggccaggcttttgcatcttagagtatacgttcaccttttcaagggcctggcatagatttgattaatcagcctggaataccctgttcctgccgacctggccgtttttacctccgtaccttatcacactcccaggaacattaagcagggagcgcttggagtcttctttgggtccccaccttgagctagacgtgaagttgacccctgggctgcagcatggctgtcgccctcgactctcagatcgacgcgcccctggaggttgagggatgcctaataatgaaggtggaaaaggaccctgagtgggcatcagagcccattctggaaggatcggatagctctgagaccttccgcaaatgcttcaggcaattctgttatgaggatgtgactggaccccatgaagctttcagtaaactctgggaactttgctgccggtggctgaagccagaaatgcgttccaaggagcaaatacttgagctgctggtgattgagcagtttctcaccattttacccgagaagattcaggcttgggcacagaagcagtgtccgcaaagtggagaggaagcggtggccctggtagtgcatttggagaaagagactggaagactaagacagcaggtcagcagtcccgtgcaccgggagaagcactccccacttggagcagcgtgggaggtggcagacttccagccagagcaggtggagacccaacccagggcggtgtctcgggaggaacctggaagcctccactcaggacaccaggaacagctgaaccgaaagcgagaacgtcggcccttacccaagaatgctcggccttctccctgggttcctgcccttgctgatgaatggaataccctagatcaggaagtgacaaccacacggcttcctgctgggtcccaggaaccagtgaaagatgtccacgtggccagaggcttttcctacagaaagagtgtgcatcagattcctgcccaaagggacctctaccgggatttcaggaaggagaatgttgggaacgtggtctccctgggaagtgcagtgtctacatctaacaagataacccggttggaacagagaaaggagccatggactctaggtctgcattcctctaacaagagaagtatcctacgaagcaactacgtcaaggaaaagtcagttcatgctattcaggtccctgcaaggagtgcaggaaaaacatggagagagcagcagcagtggggtttagaagatgaaaagatagcaggtgtgcattggagctatgaggaaacaaagactttcctggcaattctcaaagagtctcgcttttatgaaacacttcaggcctgtccccgaaatagccaagtgtatggtgctgtggctgaatggttgcgagaatgtggcttccttagaaccccagaacagtgtcgaaccaagttcaaaagtctccagaaaagctatcgaaaggtgagaaatggccacatgctagaaccctgcgccttctttgaggacatggatgctttgttgaaccctgcagcccgtgctccgtccactgataaaccaaaggagatgatacctgtccccagactgaagagaattgccatcagtgctaaggaacacatcagcttggtggaggaggaggaagctgcagaagattctgatgatgatgaaataggcatcgaatttatccgcaagtctgaaatccatggtgcccctgtcttgtttcagaatctcagtggcgtgcactggggctatgaagaaaccaagacttttcttgatatcctccgtgagactcggttttatgaagcgcttcaagcctgtcatcggaagagcaaattgtatggggctgtagctgaacagcttcgagagtgcggcttcctccggacaccagaacagtgccgaaccaagttcaaaagccttcagaagagttaccgcaaggtgaaaaatggccacgtgctagagtcctgcgcgttctacaaggagatggatgccctgattaactctcgggcatctgctccttcccccagcaccccagaggaagtcccatcaccttcaaggcaagaaagagggggtattgaggttgaaccccaggaacctacaggctgggaacctgaagagacctcacaggaggcagtaatagaagactcttgcagtgagagaatgagcgaggaggaaattgtgcaagagccagagttccagggacctccaggtctactgcagagcccaaatgattttgaaatcggaagtagcatcaaggaggatccaacacagatagtatataaggacatggaacagcatagggcattaatagaaaagtctaaaagagttgtttcccagagtaccgaccccagcaaatatcgcaaaagggaatgcatctcaggaagacaatgggaaaatcttcaaggaattagacagggaaagccgatgtctcagcctagagatttagggaaagccgttgtgcatcagaggccttttgtggggaagagaccctacagacttctcaaatatggagaaagctttggaaggagcactcgtctgatgtgccggatgacccaccacaaggagaatccttacaagtgtggtgtctgtgggaagtgctttggtagaagcaggagcctgatcagacaccaaagaatccacacaggcgaaaaaccttttaaatgtcttgactgtggaaaaagctttaatgactcctcaaattttggtgcccaccagagaatccacacaggagagaaaccctacagatgcggagagtgtggaaaatgctttagtcagagctctagtcttattatacatcagagaacgcacaccggtgagaagccctatcagtgtggagagtgtgggaaaagtttcaccaacagttctcatttcagcgcccaccggagagttcacactggggagaatccctacaaatgtgtggactgtgaaaaaagtttcaataactgtacgagatttcgagaacatcggagaatacacactggagagaagccctatggatgtgcccagtgtggcaaacgtttcagtaagagttctgttcttaccaaacatcgggaagttcatgtgagagaaaagcctctgccacaccctccatctctgtattgccctgagaacccacataagggaaagactgatgaatttaggaaaactttttgatgatgatcttctcttcctaaatgcccccttagccattttaccctaatctcattcttggaagcaatcttttcttagctatgaagtgtaatttccaagataaacttgagaatataaataaactaaacactttcatcctgttctcacctctgcctctaacttcatcagtctgttcctcctcttctgtgtgtctcagcttctcctttaagaatgtggcgaagatacattgtccgagttcagaatgaaatacccttcagtacattgaggccactgcaactggattgctaagttcggcaacattcaagatcttccatatgggtgagagttgtcttcaaggatataaaaaatgccaaaagtttttttgttgttattacctactccgtgagatcctggatgaaacttgataacagattttcacatttagatagaactttgaggagtctgatcggaactacatcaaatccatcttggttttgaagagatccacaaaagaagagtgaagattttatagctttcctcagaagtctgttacagtgtacctttttttttttttttgtcaagaagttgatccaaatagctagggcagaatccctgtattgtcactgaaatcctgttactaatgccttgccctccatggaggtgagaagcaattgatcacccctcatccttttctgtacccgaagacttaaatcccctggctgctgcttctccagcctataagtaatcccaggtcctcctactgtttctcatagccctgcacttgcctctcagttgctctgggtgctcctgccggcctcttccgaactaccatgccctcctcagatagaataggaggcctgctcgtggtgtgtctcactaaagcaaagtaggatttcagatgcgttctagttctatcctctaacttctctggctcttatctagaacatgactggcatgttggcatatttcgtacctcccacccctgcactgcagtataatattataatagtgtttctaaaactttaaggggatagggaagaggtaatagacacctgaagcatttctaagaccagttggactcctttggcctgctgtcgatcagatagccacctcagcttagaccagcgctctcaggtctggctgttaaatctcccagtctcttttcctgaggcttctagtccctgttcaccgcatcagaaacctaactgtagtgtgccaagtaacttaacacaactctagagctcactgggtgaaaagtgggaacatttataaaaacttcaatccagaaatccagaacaccgtttttgttttcctcatttacttgttttgtctgaaaaatctctttgagaacccccggcagtaacccagtaaacactgaaggaaaagttctgatgggggatggttaattgacttttgaagttacagatgaaacccagagatttgattttccatggccagttgcttcaggatggagtcagtggcgtttattcccttagtatgtaggtgacccagggtggctttgctttggcaagggagaagtcacaagtttaatgggaagggaaccggagttagggctgtttgtgggtgattattttgctcttctctctccctttctttgtcaaatgctcttatttgaagccatctggaaatgatatttttccttttggtatgtttcaatcttttgaaacttgttcagcaaagtacctaggagggtaggcactgtagaaagaaatctaatttatggtgccagaatagggtgtggcctgttggaaggcaggtgactcaggtagacattgataaatgtttctgatttacatttgttggaaatattatgactgttcacatctcaataggttgatttttctgtgttgtccaagttatagatttctaatgctaagtacagttccatgttggtagtgtgcgtagcacagtaagatgtttgtggtgccagtgggcttgtgtttatattgtgtagatgttctggaattccagctctagagaagatgtaaattaatagaaatcaccacttaataatatgtacacaggattgatattatgtggaagcatgattcaggaaagtagatgacttattcataaatatgaagcactgttacatgtaaggccatgttctagccacagtgaatgatagaaaaaggaaggaaggggcatggtgcctgggctcaaggaactcacagtttgatagaggaagcatcacagcaaaagttggggccacttacaccatggcagttacagaaggccaggagctcagtcatgagaacatcaccttcccctgcagaagagttgcgctaagttgcccagaatcatattctgtaccttcatctctcaaccttccccagtggcaggaaagggtcaagcaagacccattccctctctagtgggacaaactgattctgtttaactctcatatgcctgggagcaagctgaggtggaatttgggttcccctatctctactcctaattgtaaatgggctgtctagacatgtgttacattaatttgatgaactttgttctgaagaaatggaaggtctcccccccattttagaccaacactacctgtctccctgcattttatttgttttcacctggtacatgtaagtcaaaatgaataatcatgttctgaccaatgtgtcttttagatcacataacattgcctttatgaagattcatagaaaaaggtttttttatctagatctcagtgccaaggaaagctctgatcctaagcgcagtatgtgtacacacacacgtctacatgtgtgtgtagatctgtatgtatgtattacaaacactgtgatttttgtaacttaagctgctttttctctctttgttctggctgctggaaagttcaacaaaacttacagcccacctcaaccaactaccccaacctatatttatttaatttcatcttatttccttgtaaattgtgtcaaatcctgtttttgaaaagcagcatagactgacaacttttcactatcatcttatcgaaggcattttggaaactggggtcgtatgtcccacctaggcttgctttgttactgccacaaatacctccagttcttaccagtgatgttattatgcattcaacctaattcattcatctggaaagaaacagttttttaaaaagggaaacctcacacgtaaatggctcagggcagcctggccttggtggaatgagcatgagactggaagctgaaagaagcaagttttaatcttgtcactaaatgagtgttgtttgacacatcatagcctctctgggcctcggctcctcatctgaagagaagttgaacttaactgctaagttgctctggctctaatgtttcatgaggctgtggagcgtgatatagatgcggaagaggttagaagaccaggctgccggcccagctgtcctgtgcctgccacatctggccataccaaatccatcgcatgcttcaggaaagggaggggatgctgtgacagcaaactcagcccaggagcttgttggggaaggagaaagggcaagtccctcgtggtccacagcaggcaccccccaagcacctcgataaccagtggcaggtaggctgaagtgaaggaagcctctgtcaggaggtctggcgcccagtgacagacaagacagctgtgagggagctggggcagccctggctaaaggaatgtctgagtaacttgtgaaactggaagcctctgcctctgaatgcattccaagacctggtgcaaatggatgtccattcattgttttgtatcagtgttcacttagatgtcttcttgaaaacttgtttgtggaataaatgtctaaaataaatggctcccactggtttctgccataa

SEQ ID NO: 54 - protein, 967 aa, Homo sapiens
MAVALDSQIDAPLEVEGCLIMKVEKDPEWASEPILEGSDSSETFRKCFRQFCYEDVTGPHEAFSKLWELCCRWLKPEMRSKEQILELLVIEQFLTILPEKIQAWAQKQCPQSGEEAVALVVHLEKETGRLRQQVSSPVHREKHSPLGAAWEVADFQPEQVETQPRAVSREEPGSLHSGHQEQLNRKRERRPLPKNARPSPWVPALADEWNTLDQEVTTTRLPAGSQEPVKDVHVARGFSYRKSVHQIPAQRDLYRDFRKENVGNVVSLGSAVSTSNKITRLEQRKEPWTLGLHSSNKRSILRSNYVKEKSVHAIQVPARSAGKTWREQQQWGLEDEKIAGVHWSYEETKTFLAILKESRFYETLQACPRNSQVYGAVAEWLRECGFLRTPEQCRTKFKSLQKSYRKVRNGHMLEPCAFFEDMDALLNPAARAPSTDKPKEMIPVPRLKRIAISAKEHISLVEEEEAAEDSDDDEIGIEFIRKSEIHGAPVLFQNLSGVHWGYEETKTFLDILRETRFYEALQACHRKSKLYGAVAEQLRECGFLRTPEQCRTKFKSLQKSYRKVKNGHVLESCAFYKEMDALINSRASAPSPSTPEEVPSPSRQERGGIEVEPQEPTGWEPEETSQEAVIEDSCSERMSEEEIVQEPEFQGPPGLLQSPNDFEIGSSIKEDPTQIVYKDMEQHRALIEKSKRVVSQSTDPSKYRKRECISGRQWENLQGIRQGKPMSQPRDLGKAVVHQRPFVGKRPYRLLKYGESFGRSTRLMCRMTHHKENPYKCGVCGKCFGRSRSLIRHQRIHTGEKPFKCLDCGKSFNDSSNFGAHQRIHTGEKPYRCGECGKCFSQSSSLIIHQRTHTGEKPYQCGECGKSFTNSSHFSAHRRVHTGENPYKCVDCEKSFNNCTRFREHRRIHTGEKPYGCAQCGKRFSKSSVLTKHREVHVREKPLPHPPSLYCPENPHKGKTDEFRKTF

SEQ ID NO: 55 - DNA, 5346 bp, Homo sapiens
agcctcaacttccctcctatgtctggagagtgatcactttcactcccaaagacatcctttggtgatacttactgtgggattcagagtggggtgcagaggacgaccctgcaaaggcacggactataagagagatctgtgcagctgcgcctcagggggtgtcctgggcccctgggcatgacaggagggggaccacttgcagttctactggaaaatttaccacccttccagaatcctctgaagatatacaggtcgcaactagagtgagacccgagtactgccttgggtcagaatggctagagaaccgagaaaaaacgcagccctggacgcccagtctgcagaagaccagacggggctcctgaccgtgaaggtggagaaggaggaagcctccgccttgacggcggaggtgagagcaccctgcagccctgctcggggccccgaacgctcccgccagcgcttccgaggcttccgctacccggaggctgcgggcccccgcgaggcgttgagccggctccgagaactctgcggacaatggctgcagcctgagatgcacagcaaggagcagatcctggagctgctggtgctggagcagttcctgaccatcctgccggggaatctgcagagctgggtgcgggagcagcatccagagagcggggaggaggtggtggtgctattggagtatttggagaggcagctggatgagccggcgccgcaggttcccgttggtgaccaggggcaagaactgctctgttgcaagatggcactattgacacaaactcaagggtctcaaagtagccagtgccagccaatgaaggctctgttcaagcatgaatctctgggatcccagcccttacacgatagagttctccaggttcctgggcttgcccagggagggtgctgcagagaagatgcaatggtagcttccaggctcactccagggtcccagggtttgctgaaaatggaagatgtggccctgaccctcactcctgggtggacacagctggattcatctcaggtgaacctctacagagatgaaaagcaggagaaccatagcagcctggtctcccttggtggtgaaatacagactaagagcagggacttgcctccagtcaagaagcttccagaaaaggagcatgggaagatatgccacctgagggaagacattgcccagattcctacacatgcagaagctggtgaacaggagggcaggttacaaagaaagcagaaaaatgccatagggagtaggcgacattattgccatgaatgtggaaagagttttgctcaaagttcaggcctgactaaacacaggagaatccacactggtgagaaaccctatgaatgtgaagactgtggaaagaccttcattgggagctctgcccttgtcattcatcagagagtccacactggtgagaagccatatgagtgtgaagaatgtggtaaggtcttcagtcacagctcaaaccttatcaaacaccagagaacccacactggggagaagccctatgagtgtgatgactgtgggaagaccttcagccagagctgcagcctccttgaacatcacaaaattcatactggggagaagccataccagtgcaatatgtgtggcaaagcctttaggcggaattcacatctcctgagacatcagaggattcatggtgataaaaatgttcagaatcctgagcacggggagtcctgggaaagtcagggtaggacggaaagccagtgggaaaatactgaggctcccgtgtcttataaatgtaatgagtgtgagagaagtttcacacggaatagaagtcttattgaacatcagaaaatccacactggtgagaaaccctatcagtgtgacacatgtggaaaaggtttcactcgaacttcataccttgttcaacatcagagaagccatgtagggaaaaaaactctttcacagtgacccatggtattcatgccaacattggtgctcatttgtcactgaactgaagccaccctggagcccttaatggttacagaaattgtggaccagggctttatttaccactatacatcatcgggtattagaaaatgtagtctggctgagacgatgagttatcttctacattctagaaagtgattggaagaagtcatttgataagaggccatgggagagtggtctggaagttgtaggacctaaaatagtttgttctcacccagtgtatttaaatggccttctggacttgttaattgccctcagccagcactttaggacatctggttggatggctctgatgtggggggctgctgctctgaccattcattttgcctctaatgaatctttcacaaattggtcagatccatgaggtcttttactcttctttgtgccttgtatgataggtgctaataaacatttattaaatgtaccagtaaaatggcctttgtaccaaaaatttgatgttgtctatatttctgagaaatttctaacttatgccatttgaatttatgtattattctctgaggttctagattctgggccaatctagtgtatttgttgccacgtacatactgttttcagaattggggtgggggaatccatatttctctaccatgatagtagagatgagaagaatgccttaaacagcttctttatcattaagacactgtgagattgctccatccatagaactccactgtctggtcaatgttaattatgttagtttacattaattttgctactctttagggggagtctttcacattcaggtaaataaaaatcaacttactgagttagatcaaaatgattattatgaattttgaacacattctgtaacacttaccatcttgtttcttaccttttagttatcttgggccgaccaagtgctaagacgtcatctgtgtccctcttccccagtttatagctgactgtgcatcaaggcttatgccagctaagcttaaactttctccaggtccgaagattcataacaaatatttataattattattcatggtttcaaaactgccctgtcagttggggacaggaagatcaggttagaggcagcctatgaggatagaaactcacatctgagtggtaggagaaaatgtatctgttcaggctgggtgccatggcttacacctgtaatcccagcaatttgggaggctgtggcaggcagatcacatgaagtcagaagtttgagaccagcctggccaacacggtgaaaccccatctctacaaaaaatacaaaaattagccaggcatggtgacacacgcctgtaatccctgctacttgggaggctgaggtaggagagttgcttgaaactgggaggtggaggttgcagtgagccgagatggtgccactgcagtccagcctgggtttcagagtgagactctgtctcaaaaagaaaaaaaaaaaagaaaagaaaatgtgtctgttcagaagcacattgggaatcctaggtatctgatgaaaaagattgtacaatatccaaagtgttgatatgtgatgtcaaggctcaatgctgtgagttattcacaagaaataagaattttttgatatcttctgctttcacccaaatcacctgcgatgcttaaagactgatttcttccgaagtgctcaagtgcctattaccatcttccagcattgccagactgtcatgaatggattctgcttctgatgaaatccctgaccatgttttattcagtcaccagcatcgtgttcttgtctatcctcaaataccctttctggatttctcctctgaaataccacaggctgaccagagacttacaaaaccgtagagctctccctttattaattccctacaatcttttattgccttcattatctccttttcagtctaatttaaaacttctttagaattccaaagttctgtagactttctctgctcaatcttttctagccttttcaaatttctttaaaatcagctttatttatgttatttccacaaagctagccatttccttttctcctttttcacttctcctaaatatttgctaaatagctctgattttacacactcaaactcattacagacaactctgttaacttttctgtgatatttgtttctgatgttacatgaagagatatatgtgaaagccttttacaaaccagaaagcattatacaaatataacttcctgagattaactaaggaccactgtgcctcctttcactcctgcgcctccaagcctaaaagtcttctctgtagaggagggaaatattgtagaaaagtacttttcagtgtctgctatgctagaaaagggaagaaataaagcctctatttgtgtgtgtgtgtgtgtgtgtgtatacacacttaggcttaggtctttagtacagtcaggttggtaagacttgcacacaaataaggcagtgtaatgataaatgccttatgagtggtaaactgaggcttgtagaaattcagagaaggaaaaggatgcttccagctgtgcaagctgttattatatggacagggtgacatgttagaaagctgaatggactcacaacaactttgtccaattgagtaaataaagcaaattttaagagatagggacattgtaggggccttcagtgccagagcaaaaagtttaaattttattcagtaagcactggggagccatgatattttataatcaaaatattatctaggaaactttatctggtgtattatataatatcaaataaaatcattttgcttacagtcttttagatactccacttttctataaaacagtggtatgtgtttataaatagctgaattataaaatgagtttatctgtagcctattgaaaggatggccaaaaaagttattttccaatgaaattagatctagtaaagtaaactacttagttgagatataagcagtatataaagcacaataaaatgccacttttcatattttcttaaattgcttttaggaattttagtggtgactagtctgccattctatttcatttctgtaactgaagcagcgcagaaatcttctattttcttttttctccctttgcttgaatagtaaatggttatagcactttttctacttcgatagaatgaatggttataatgaaaaaagcttttgatgaatggcactcttggatttgttcttaattttggcaaagacgtatataattctgcaaaagactttctctgcctcttcctttagtgagagaaaaaaaaaggtaggaatgacaacttaactcctaggattctgaggatctgcttatacaaataagaagtgctaagtaaaaactctgaaaatgttgctaactggtagagaaatggagattaacactttgttaatggaaacctccaaataaaggaattataattgtttaataataaagactatattttaaaagtgtcctgtaa

SEQ ID NO: 56 - protein, 545 aa, Homo sapiens
MAREPRKNAALDAQSAEDQTGLLTVKVEKEEASALTAEVRAPCSPARGPERSRQRFRGFRYPEAAGPREALSRLRELCGQWLQPEMHSKEQILELLVLEQFLTILPGNLQSWVREQHPESGEEVVVLLEYLERQLDEPAPQVPVGDQGQELLCCKMALLTQTQGSQSSQCQPMKALFKHESLGSQPLHDRVLQVPGLAQGGCCREDAMVASRLTPGSQGLLKMEDVALTLTPGWTQLDSSQVNLYRDEKQENHSSLVSLGGEIQTKSRDLPPVKKLPEKEHGKICHLREDIAQIPTHAEAGEQEGRLQRKQKNAIGSRRHYCHECGKSFAQSSGLTKHRRIHTGEKPYECEDCGKTFIGSSALVIHQRVHTGEKPYECEECGKVFSHSSNLIKHQRTHTGEKPYECDDCGKTFSQSCSLLEHHKIHTGEKPYQCNMCGKAFRRNSHLLRHQRIHGDKNVQNPEHGESWESQGRTESQWENTEAPVSYKCNECERSFTRNRSLIEHQKIHTGEKPYQCDTCGKGFTRTSYLVQHQRSHVGKKTLSQ

SEQ ID NO: 57 - DNA, 4642 bp, Homo sapiens
attcgggtccgggttttagttcctcggggagcccctggtgccccggatacggctgattttgtcgtgtgggacctgttctggctgctccagccccaggaaggacccaggacacccggaagccggaaatggactcagtggcctttgaggatgtggctgtgaacttcacccaggaggagtgggctttgctgagtccttcccagaagaatctctacagagatgtgacgctggaaaccttcaggaacctggcctcggtcggaatccaatggaaagaccaggacattgagaatctgtaccaaaacctggggattaagctaagaagtctggtggagagactctgtggacgtaaagaagggaatgaacacagagaaactttcagccagattcctgattgtcacctgaacaagaaaagtcaaactggagtgaaaccatgcaaatgcagcgtgtgtgggaaagtcttcctccgtcattcattcctggacaggcacatgagagctcatgctggacacaaacgatctgagtgtggtggggaatggagagagacgccccgtaaacagaaacaacatgggaaagcctccatttcccccagtagtggtgcacggcgcacagtaacaccaactcgaaagagaccttatgaatgcaaggtgtgcgggaaagcctttaattctcccaatttatttcaaatccatcaaagaactcacactggaaagaggtcctataaatgtagggaaatagtgagagccttcacagtttccagtttctttcgaaaacatggaaaaatgcatactggagaaaaacgctatgaatgtaaatactgtggaaaacctatcgattatcccagtttatttcaaattcatgttagaactcacactggagaaaaaccttacaaatgtaaacaatgtggtaaagccttcatttccgcaggttaccttcggacacatgaaatcagatctcacgcgctggagaaatcccaccaatgtcaggaatgtgggaaaaaactcagttgttccagttcccttcacagacatgaaagaactcatagtggaggaaaactctacgaatgtcaaaaatgtgccaaagtctttagatgtcccacgtcccttcaagcacatgaaagagctcacactggagaaagaccttatgaatgtaataaatgtggtaaaaccttcaattatcccagttgttttcgaagacataaaaaaactcatagtggagaaaagccatatgaatgtacaaggtgtggtaaagcctttgggtggtgcagttccctccgaagacatgaaatgactcacactggagaaaaaccctttgattgtaaacagtgtggtaaagtctttactttttcaaattaccttagacttcatgaaagaactcatttggccgggcgtagccagtgctttggcaggaggcagggggatcacctgagcccaggagtttgagaccagcctgggcaacataagaaggccccatatcggctgggtacggtggctcacgcttgtaatcccagcactttgggaggctgaggcgggtggatcacctgaggtcaggagttcaagactagcctggccaacatggtgaaaccccgtctctactaaaaatacaaaaaaattaactgggcatggtggtgggcacctgtaatctcagctactcgggaggccgaggcaggagaatcgcttgaacctgggaggtggaggttgcagtgagccgagatcacgccattgcactccagcctgggcgacaaaagtgagactccatcacacacacacacaaaaaagccccatatcacgtggtggctcatgcctgtaaaaccagcactttgggaagccgaggtgggtggatcacgaggtccagagatggagactatcttggccaacatggtgaaaccccgtctctactaaaaatacaaaaattagccaggcgtggtggtgtgtgcctgtagtcccagctactcgggaggctgaggcaggagaattgcttgaaccagggacttggaggttgcagtgagccgagatcgcgccgctgcactccagcctggtgacagagcgagacttcgtctcaaaacaaacaaaaaaaagaaggccccatatctccaaagaaaaaaaaaattaactgggtgaggtggtgcatccctgtagttctagctgctcagaaagctgaggtgggaggaacccttgagcctgggaggttgaggctgcagtgagctgagatcgtgccactacactccagcctggatgacggtgacactctgtctcagaaaaaaagggaaagaaataattctcatttatacaggagagaaatcctatgaatgtaaggaatatgggaatacattcagtttccaaagatatgaaaagactaactggaaaaaaatccaaagacctcagatattccagttctattcagagccataaaaggactcatactggagaaaaattgtagaaatgtacagaatatggggaaactctcattgctctcatctccattcaaagacacgtgtcagtgcacactggagatggatggtatgaatcgaagaatacacactggatggaaacgttagtagtttggaaaatacaggaaacttccattttaacaataattaaaattcacatgggctgtgcacagtggctctcccctgtaatcccagcattttgggaggctggggtgggtagattgcttgaggccaggtattcaagaccagcctggcaacctggagaaatcccatgtatacaaaaaatagaaaagttagccagggatgatggtgttcgcctgtagtcccagctactcaggaagctgaggtgggaggattgcttgagtttgggaggtcgaggttgcagtgagtggagattgcgccactggactccagcctgggcaacagtgagaccctgtctaaaaaaattaatcatgtgagaacatccactcgaaagaaatcctataaacgtaagtaattttgaaagcctgatgcaaattaattattatataatgctcaaaaacttaatcatgaatgagttattacacaaagttataaatatatagcatttatcagtggctcattcttttttctttcttttttttttttttttttgagatggagttttgccctgtcgcccaggctggagtgcagtggcacaatctcggctcactgcaacctccgcctcctgggtgtgagcaattttcctgcctcagcctcctgagtaactgggattataagcacatgccaccacgcctggctaatttttttgtatttttagtagagacggggcttcaccatgtggttcaggctggtctcagactcctgaccttgtgatccgccctccttggcctcccaaagtgctgagattacaggtgtgagccaccgcgcctggccttttttttttttcccgagacacagtctcactctgttgcccaggctagagtgcagtggcgcgatcttgactcactgtaacctctgacttctgggttcaagcaattctcctgcttcagtctccgaagcatctgggattacaggcgcacgccaccatgcccagctaaatttttggtatttttgtagaaacagggtttttccacattggccaggctggtcttgaactcctgacctcaaggaatccatcctcttcagcctcgcaaagtgctgagattataggcatgagacaccttgcccggcccctgtgactcattcttaaaaaggatctttggattatgggtttccacttttgcaaggaaatgtgagaatgatactctttaagcagtggtacctgaggtttaataggaagtgtttttatcctaagttagttaataaaatttttttctatccattttggttttcatttttttctatccattttaaagtgttggatctgtgggtgaagtgaaatttatttctaatatgtaagcaggtttaatttttatgtagtgtttaattgttctgtgatgaatgggccattacaaaatgagtctatttttgtttgttttcttttgtttttgagactgagtcttgctctgtcgccaggctgaagtgtagtggcgcgatcttggctcactgcaacctccacctcccgggttcaagtaatccccctgccttagcctcctacaggcgcgtgccgacatgcctggctaattttttgtattttagtagagacggggtttcattgtactggccaggatggtcttgatttcctgaccttgtgatccaccccaccttggcctcccaaagtgctgagattacaggagtgagccactgcgaccggcccatgagtctttattaatagagatttcttactggtgttatgtggcagattctgcatattcctcacccatcatatgtattccactttcctttattatggggaaaactactctttttggcatgatacaatgttgactccattttctttgctaataaggacttggtatcaatttatcagtatgtaaagtttaccatagagtattgtctcatgtgaatcattcccattttttgctctttactctttgtcgttatttctgagtattatttggatggttcattttgacttaaggatagccctgtgatatgacaatatttttatctaatctgatggagaaagcatttagtctcctgatcaagtatgatgttagctgcaggtttttaataaatgccttaattcagtttgaa

SEQ ID NO: 58 - protein, 436 aa, Homo sapiens
MDSVAFEDVAVNFTQEEWALLSPSQKNLYRDVTLETFRNLASVGIQWKDQDIENLYQNLGIKLRSLVERLCGRKEGNEHRETFSQIPDCHLNKKSQTGVKPCKCSVCGKVFLRHSFLDRHMRAHAGHKRSECGGEWRETPRKQKQHGKASISPSSGARRTVTPTRKRPYECKVCGKAFNSPNLFQIHQRTHTGKRSYKCREIVRAFTVSSFFRKHGKMHTGEKRYECKYCGKPIDYPSLFQIHVRTHTGEKPYKCKQCGKAFISAGYLRTHEIRSHALEKSHQCQECGKKLSCSSSLHRHERTHSGGKLYECQKCAKVFRCPTSLQAHERAHTGERPYECNKCGKTFNYPSCFRRHKKTHSGEKPYECTRCGKAFGWCSSLRRHEMTHTGEKPFDCKQCGKVFTFSNYLRLHERTHLAGRSQCFGRRQGDHLSPGV

SEQ ID NO: 59 - DNA, 5630 bp, Homo sapiens
gcctttgtctctggctgcagccggagctcctgctctcctcctcactgctcagtgtcctctgctcctagaggcccagcctctgtgtccctgtgacctgcagatattgggagatccacagctaagacgccgggactccctggaaacctagaaatggaaccactgacatttaaagatgtcgccatagaattctctctggaggagtggcaatgcctggatactgcacagcgggatttatataggaatgtgttgttagagaactacagaaacctggtctttttgggtattgctgtctctaagccatatctgatcacctgtctggagcaaaaaaaagagccctggaatataaaaagacatgagatggtagccaaacccccagtaatgtcttttcattttgcccaagacctttggccagagcagaacataaaagattctttccagaaagtgacactgagaagatacggaaaatgtgaatatgagaatttacagttaagaaaaggctgtaaacatgtggatgagtgtacggggcacaaaggaggtcataatacagttaaccaatgtttgacagctaccccaagcaaaatattccagtgtaataaatatgtgaaagtctttgataaattttcaaattcaaatagatataagagaagacatacaggaaacaaacacttcaaatgtaaagaatgtagcaaatcattttgcgtgctttcacaactaactcagcatagaagaattcatactagagtgaattcctacaaatgtgaagaatgtggaaaagcctttaactggttctcaactcttactaaacataagagaattcatactggagaaaagccctacaaatgtgaagaatgtggcaaagcctttaaccagtcctcacaacttactaggcataagataattcatactgaagagaaacccaacaaatgtgaagaatgtggcaaggcctttaaacaggcctcacaccttactatacataaaataattcatactggagaaaaaccttacaaatatgaagaatgtggcaaagtctttagccagtcctcacaccttactacacaaaagatacttcacactggagagaacctctacaagtgtaaagaatgtggaaaagcttttaacctattctcaaatcttactaaccataagagaattcatgctggggagaaaccctacaaatgtaaagaatgtggcagagcttttaacatatcctcaaaccttaataaacaggagaaaattcatactggagggaaactcaacaaatgtgaagaatgtgacaaagcttttaaccgatccttaaaacttactgcacataagaaaattctaatggaagagaaaccctacaaatgtgaagaatgtggcaaagtctttaaccagttctcaactcttactagacataagataattcatactggagagaaaccctacaaatgtaaagaatgtggcaaagcttttaaccaatcttcaaaccttactgaacataagaaaattcatactgcagagaaatcctataaatgtgaagaatgtggcaaagcttttaaccaacactcaaacctaattaaccataggaaaatttattctggagagaaaccatacaaatgtgaagaatgtggaaaagcttttaatcgatcctcaacccttactagacataagaaaattcatactggagagaaaccctacaaatgtgaagaatgtgacagagcttttagccagtcttcaaaccttactgaacataagaaaattcatactggagagaaaccctataaatgtgaggaatgtggcaaagcttttaaccgattctcaacccttactaaacataagagaattcatactggagaaaaaccctataaatgtgaagaatgtggaaaagcctttaatcaatcctatcaacttactagacataagatagttcatactaaagagaaactcaacaaatgtgaagaatttggcaaggcctttaaacagtcctcacaccgtactatacataaaattattcatactggagagaaaccctacaaatgtgaagaacatggcaaagtttttaaccagtcctcaaaccttactacacaaaagataattcatactggagagaacctctacaaatttgaagaacatggaaaagcttttaacctattctcaaacattactaaccataagataatttatactggagagaaaccccacaaatgtgaagaatgtggaaaagcttataaccgattctcaaacctaactatacataagagaattcatacgggagagaaaccttaccaatgtgcagaatgtggcaaagcctttaactgctcctcaacccttaatagacataagataattcatactggagagaaaccttacaaatgtaaagaatgtggcaaagcttttaacctatcctcaacccttactgcacataagaaaattcatactggagagaaaccctataaatgtgaagaatgtggcaaagcttttaaccaatcctcaaaccttactacacataagaaaattcatacttcagagaaaccctacaaatgtgaagaatgtggcaaatcctttaaccagttctcatctcttaatatacataagataattcatactggagagaaaccctacaaatgtggagattatggcagagctttcaacctatcctcaaatcttactacacataagaaaattcatactggagagaaaccctacaaatgtgagtatggcaaaacttaattgatcctacaagcttactacacataggaaaattcatactggagagaaactacaaatgtgaagaatgtgttaaagcctttaacaagtcttcaactttttctgcacacacgaggtattttatactggtgagaaaccttacaatgtaaagaatgtggcacagcttttaactaatcttcaaaccttactgaaagttgagaaaattcgtactggagagaatcctacaaatgtgaaaaatgtggcaaatcctttaactgatcctcaacttttactaaacataaggtaattcatactggagaaaagccatacaaatgagaagaatgtggcaatgcctttaatcagtcctcacacctttctacacataagataatttatactggagaggaactctatagttgtgaagaatgtggcaaagcttttaaccaatcctcataccttactatacagaaattcatactggagagaaagcctacaattgtgaagaatgtggcaaagcttttaaccttccttaacccttaactgtagataagaaaattcatactggaaagaaaccctacaaatgtgaagtctgtggcaaagcttttaactgattctcaactcttactacatgtaagagtatttatactggaaagaaaccctacaaatgtaaaaaacgtggcaatgcctttaactggtcctcacaccttgctacatataagacagtttatactttgagagaaaccctgcaaatgtgaataatgtggcaatactttaaaccaatcctcaaacctcactaaacataagataatactgaaaactttacaaacctgaatgatgtgacaataattttgacaacacctcgaactttctaacataaatcatactggtgaaaaatcctagaaatgtgaaaaatatcacaaagcctttaaatggttgtcacacttgattgtaggtaagaatccatactgaagaaaactcctggaagtgtaaaaaatgtggcaacacttttaataaatgctcaccccttattgcacaggaaagcatttatacttcagaaagattgtacaaatacaaggaatgtggaaaagccattattatctgctcagattttactcaacattagagagttagtacgtaataaaagcattataaatgcaatttttgtcaagagatctttcagaaaatataagcctttaaagtgaagaagaggagccagttgtgctggctcacatctgtaatgccagcactttgggaggccaaggtgggtggatcacctgagggcaggagtctgagaccagcctggccaacatagcaaaaccccatctctattaaaaattttacaaaaattagctgcgtgtggtggcaggcccctgtaatcccagctaattgggaggctgaagcaggagaattgctcaaacctgggaggcgaagattgcagtgagctgaaatcacaccactacactccagccaaagcaacaagagcaaaaacttcgtctcaaaaacaaaacaaaaaaagagtattcattgtgaggacaaacaatacaaatacgaagagggttgtagtacctttacttgtatcacagatacttttgtacccattttgcactagaggaaaaccatgaagcagttgctcaaatgttgttcaacaccagaaaatttatattggagaaaagcactgtaaatgtaatgcatttgtgaaaacattttttaaaaaactacagcttagaaaataccagaggcctcatactaaaatatatttttgcaagtgaagtaaatataaaaataatttaatccaaaattaagtctatataaatatcagagaattcacagtagaaatatctaaggtactgacacttcagacattgctgagtatagaatcagaatgctgagtatagaaaataatttaaaactaaagttggtaggtaaataatgtgtatataactttaaaagaagtagaatttttttgtagatgtataattacattcaaattatattttttcttgaaaaattagtttttgaaaagcaaatgatgtaattcaactcaaattcatgctcttcattcctattgtattcacatgtgaaagcatgtgattaatttttcatgcatcaaagatatgagaaatcatttctgttaggtcggtattatttatgacactttctatgaaagaataaggacattaaaatgtaagatgcatgatgaaaacctgagtgaagaggctgtttgtgtttaacttataatattgagtgatccatgaagtaggttttcagagcaatattcttctgcattatagtaagagaaaaccatttttaatcttagttaaaattaaagtgaattagtagtatatcattttactatttgtacttttatgtaataaaatgcaatgtgtttaaaaatttttggattatgcgtgaacttagttttttaattaaactttttttaacatgttaaaactattgtgcattcaatgaagtgttttcatgccactgactttacctatcccacattactcaagggtttaggtaaaagagggtaacagtatactacttgataacataatgggctaacatctctaataattatttttgctagtgactttaaactgctaataaagaatattgttcccataggttagatttttattctttttaaaatttaaacttatttctcttaatttttgtggatacatagtatgtgtatatctttatgccatgtatggcatattttgatacaggcatataattttatgtattaatcacatcagggcaaaagatgtatccatcaactccagcatttctcctttgtattacaaaccaattctgcacttttagatactttagaatgtacagtcgttactacagggtcattttatggttataataaaaattatatacaagtataaataaaccatgagaaaattctgagttctgaataaacatttaaaaaa

SEQ ID NO: 60 - protein, 852 aa, Homo sapiens
MEPLTFKDVAIEFSLEEWQCLDTAQRDLYRNVLLENYRNLVFLGIAVSKPYLITCLEQKKEPWNIKRHEMVAKPPVMSFHFAQDLWPEQNIKDSFQKVTLRRYGKCEYENLQLRKGCKHVDECTGHKGGHNTVNQCLTATPSKIFQCNKYVKVFDKFSNSNRYKRRHTGNKHFKCKECSKSFCVLSQLTQHRRIHTRVNSYKCEECGKAFNWFSTLTKHKRIHTGEKPYKCEECGKAFNQSSQLTRHKIIHTEEKPNKCEECGKAFKQASHLTIHKIIHTGEKPYKYEECGKVFSQSSHLTTQKILHTGENLYKCKECGKAFNLFSNLTNHKRIHAGEKPYKCKECGRAFNISSNLNKQEKIHTGGKLNKCEECDKAFNRSLKLTAHKKILMEEKPYKCEECGKVFNQFSTLTRHKIIHTGEKPYKCKECGKAFNQSSNLTEHKKIHTAEKSYKCEECGKAFNQHSNLINHRKIYSGEKPYKCEECGKAFNRSSTLTRHKKIHTGEKPYKCEECDRAFSQSSNLTEHKKIHTGEKPYKCEECGKAFNRFSTLTKHKRIHTGEKPYKCEECGKAFNQSYQLTRHKIVHTKEKLNKCEEFGKAFKQSSHRTIHKIIHTGEKPYKCEEHGKVFNQSSNLTTQKIIHTGENLYKFEEHGKAFNLFSNITNHKIIYTGEKPHKCEECGKAYNRFSNLTIHKRIHTGEKPYQCAECGKAFNCSSTLNRHKIIHTGEKPYKCKECGKAFNLSSTLTAHKKIHTGEKPYKCEECGKAFNQSSNLTTHKKIHTSEKPYKCEECGKSFNQFSSLNIHKIIHTGEKPYKCGDYGRAFNLSSNLTTHKKIHTGEKPYKCEYGKT

SEQ ID NO: 61 - DNA, 9080 bp, Homo sapiens
gactaatggccctaactaagtattaacccctgccaagaaaagagctacttcctcttgaagtaaatgaagatagtgatgctttctcttaaactttacttataaaaagcatcaaaggggggaatgaagcaggaaatataaaaggaaaaacaagtaaagggaaaacaagtcctttcctgaccagtctgactcactccaaagtcctgctggagctatgataattatctgcaaggccaggcaggggctccgaaggagtgggctccaggagcagggatgagaaaaacaagttctccttatcagtttccctgtttgaaattctctccccataacattattctttgttctgctctcacaactatttttgtaactatttctgcaagtctgtaaagattttgtaagttcttgtttttctttctgtagcatggcaaggtcacaagacatgtttaagtaaggtaggctcatgttgcaaatcctgttgtaaaacctgtcacggtatgattaactgcctttgttctgcttctgtaagactgctttctcacctcgcaggttttgcgccaaaaacccgacttgcccctgcctgatgcatgtataaaagtcaagccctgtctttgttcagggctcagcctttggatgttaatccgctgggccagtggccacctaaataaaaccttcctgttgcacccagtgatctctccggcctcctgattcccacaacatataagcattcctttttctctgcaacctagcccgcatctgtcattgactttttaacaataggcattctgactggatgagatggtatctcactgtggtttttctctgcatttttctaataattaacaacgtgaattttgttttcatatgcttgtcagccacatgtatgtcttcttttgaaaagtatctgttcatgtttttgcttactttttaattaggtttttggttttctttttgttgttgttgttgttttctgagatggagtcttgctgtgtcaccaggatggagtgcagtggcatgatctcgactcactgcaacctccacctcccaggttcagatgattcttctgcttcagtctcctgagtagctgggatcacagggaccattgacatttatggatgtggccatagaattctctttggaggagtggcaatgcctggacactgcacagcagaatttatataggcatgtgatgtgagagaactacagaaacctggttttcttgggtgaaggtattgctgtctctaagccagacctgattacctgtctggagcaaggaaaagagccctggaatatgaagagacatgagatggtagctaaacatttagttatgttttattattttgcccaacacctttggccagagcagaacataagagattctttccagaaagtgaccctaagaagatatagaaaatgtggatatgagaatttacagttaagaaaaggctgtaaaagtgtggttgagtgtaaacagcacaaaggagattatagtggacttaaccaatgtttgaaaactaccttgagcaaaatatttcaatgtaataaatatgtagaagttttccataaaatttcaaattcaaatagacacaagatgagacatactgaaaataaacattttaaatgtaaagaatgtcgcaaaacattttgcatgctttcacacctaactcaacataaaagaatccaaactagagtgaatttctacaaatgtgaagcatatggaagagcctttaactggtcctcaacccttaataaacataagagaattcatactggagaaaaaccttacaaatgtaaagaatgtggcaaagcctttaaccagacctcacaccttattagacataagagaattcatactgaagagaaaccctacaaatgtgaagaatgtggcaaagcctttaaccagtcatcgacccttactacacataatataattcatactggggaaattccctacaaatgtgagaaatgtgttagagcttttaaccaagcctcaaagcttactgaacataagttaattcataccggagagaaacgttatgaatgtgaagaatgcggcaaagcttttaaccgatcctcaaaacttactgaacataagtacattcatactggagagaagctgtacaaatgtgaagaatgtggtaaagcctttaaccagtcctcaacccttactacacataagagaattcatagtggagagaagccctacaaatgtgaagaatgtggcaaagcttttaaacaattttcaaatcttactgaccataaaaaaattcatactggagagaaaccctacaaatgtgaggaatgtggcaaagcttttaaccaactctcaaaccttactagacataaggtaattcatactggagagaaaccctacaaatgtggagaatgtggcaaagcctttaaccagtcctcagcccttaatacacataagataatccatactggagagaatccccacaaatgtagagaatctggcaaagttttccacctatcctcaaaacttagtacatgtaagaaaattcatactggagagaaactctacaaatgtgaagaatgtggcaaagcctttaaccgatcttcaacccttattggacataagagaattcatactggagagaaaccctacaaatgtgaagaatgtggcaaagcttttaaccaatcttcaacacttactacacataagataattcatactgaagagaaacagtacaaatgtgatgaatgtggcaaagcttctacctgatcctcaaaactcattgaacacaagaaaattcatactggagagaaaccttacaagtgtgaagaatgtggcaaaacttctaaccatttctcaacccttactaaacataagatgattcatactggagagaagttacacaaatgtgatgaatgtgacaaagcttttaaccaatcttcaaccctttctacacataaaagaattcatactggagagaaaccctacaaatgtgaagaatgtggcagagcttttaattgatcatcaaaccttattaaacataagaaaattcatattggagagaaaccctacaaatgtgaagaatgtggaaaagcttttaaccagttctcaactcttactacacataaaataattcatactggagagaaaccatataaatgtgaagaatgtggcaaagctttcaacctatacgtaaaccttactacacataagaaaattcatactggagagaaaccctacaagtgtgaagaatgtggcaaagcttttagccaagtgtcaactcttactatacataaaagaattcatactggagagaaaccctacaagtgtgaagaatgtggcaaagcttttaaccaagtgtcaactcttactatacataaaagaattcatactggagagaaaccttacaaatgtgaggaatgtggcaaaactttcagtcgatgctcaaaacttactacacataagaaaattcatacaggagagaaaccttacaaatgtgaaaaatgtgctaaagcttttagccagtcttcaaccctttctacatataagataattcacactggagagaaatgctacaaatgtgaagaatgtggcaaagtttttaaccgatcttcaaaccttacagaccataaaaaaattcatacaggagagaaatcctacaaatgtgaagaatgtgacaaggcctttaacctgtcctcaacgcttactaaacataaggtaattcatactggagagaaactgtacaaatgtaaagaatgtggtaaagcttttaaacagttctcacaccttgctatacataatataattcatactggagagaaactctacaaatgtgaagaatgtggcaaagcttttaacttatcctcaaaccttactgcacataagaaaaatcgtactggagagaaaccctacaaatgtgaagaatgtggcaaagctaacctatcatcaacccttactccacataagacaattcatatttgagagaaaccctgcaaatgtgaagaatgtggcaatgcttgtaactaaatctcaaactttactaaacataagaaaattaatactggaaactttacaaacctgaaagatgtgacaatgattttgacaacaccttcaaacttttctaaacataaaataaatcatactggtgagaaatcttaaaaatatgaagaatggtacaaagcctttaaatggttgtcacacttgattgtaggtaagataatttatactggaggaaactcccagaagtgtgaagaatgtggcaaaacttttaatttttcacaccttatagcacaggaaagcacttcagaaaaattgtacaaatataaatgtggaaaagccattaatatctgcttacatcttactcaacattagagagttagtgcttaataaaagcattataaaagcaattagtgtaaaatcagaaaatgaaagttttttttttttttttagatggagtcttgctctgtcacccaggctggagtgcagtggtgtgatcttggctcactgcaacctctgcctcccaggttcaagcaattctcctgccttagcctccagagtagctgagactacaggcacacaccaccacatttggctaatttttttatttttagtagagactggctatcaccatgttggccaggctgatcttgaactcctgacctcaagtgatccacatgcctctgcctcccaaagtgctgggattataggtgtgagtcactgtgcctgacaaatataagcctttaaagagaagaaggttttcattttgaagacaaacattaggtacataaagagggttgtagtgtctttatttgtatcacagattttattgtacacattatgtactaaaggaaaatcctgaagcagtgctcaaactttgatcaacatcagggagtttatattggagaaaaactgcaaatgtaatatatttggaaaaacatttttcaaaaactactgcttagaaaacaccaggggatttatactaaaatatatttttgcagatgcagtaagtataaaagaaatttaatccaaaattaagtgtgtgtaaatatcagagaattcacagtagaaatatctaaggcactgacattttagacattgaactaatcagtgtgctgagtacagaaaataatccaaaattaaagttggtagataaattatttatatataactttaaaagaggtagaaatatttttagttataattacatttaaagtatacttttttctttgaaaaaattacaaaatttttaaaaagtgaatgatgtaattcaactcaaattacttcatgcttttcattctattgtattcacatgtgaaagcatgtgatcaattgctgcttcatcaaagatatgagacattcttttttgttaggtgggcaatattttttaccttttctatggaagagtaaagacattacaatgtaggatgcatgataaaaatctaagtggagaggctctttgtgtttaatttataatattgaatgatgtatgagggaagtgttcagaggaatattctgcattctagtgaaaatatcttttattttagttaaaattaaattaaaattagtagtatatcattttactaactgtacttttatgtaataaaatgcagcacatttaaaaaattttagattattgtgaacttaattttttaattaaactttttttttaacatgttaagaccaattgtgcattcagtgaagtattatcatgccactaacttcaacctatcccaccttactcaagggtgttggtaaaagatagtaacaatgtactatttaataacagagtggactaacatctctaataatttctcttgccagtgactttaaactaaagaacttaattaaagaacattgttcccataggttaaatttttattctttttcttatttaaacatatttttcttaacttttgtgggtacatagtgtgtgtatatatttatgccatatatggcatattttgatacaggcatatgaataggtattaatcacatcagggcaaatgaaatatccatcaactccagcatttatcatttgtattacaaaccgattctacacttttagttactttaaaatgtacaagtaaattgctattgactatagggtcattttcatgggtataataaaaattatatacaagtataaataaaatcctgagtcttaaaattctgagtcctgcttaaacattttaaaaattttgttatgtatttttctttgaacatgtctctctgcctgcaaacataacagaattttagtattggtttacatagagttaactatacccatatattactctaaaaataaatgttaagtgcaagaaagttatggactgtttttgtgtgagtgtgagtttgtacctattttcaaaagaaaagagcaatattggagcaaaacaaatattttaataaagtaatgtactagacaactgaaaacttcaaaaatgctgaaagtaaatgtatactctgctttgtattgaattcattactgccaaatcttctgacttatgattcagaatctctccatgcaaattatgtttttacttgcctgttagtcatgctagacctataattttcttgtttcttaccatttttttcttttatactttatgaggtattatgtgagctgttcatggattataagaatgatttttataaaattcagtactgcacacaagataagttttagatgtatttccaaaattgtgtattaattatatttagttagaacattccatttgttcttttaattggagaatcctatataagcctatatttcttattcttttctcttgttataattgacataagtaaatttatttatttattgagccaatttgttcaggtaagaactaggaatgcttcataagtcatgaggatgtttttatatatatatgtggcaaacaaatatgacagtgcttgctgtgtaacagatgttccataataacctgtaaacattcctgctggagttagtttgtaacttcaagtcagagatggaaaataccaatagtgaagaaataacattgattcttcatgtgcagataacattttttttccatgctgcaaagctaaattttgctgaatttaaaaagaaattttggttcttttatttcctaattacctttagttttgtttgtcttattatgtgacttctgtgtattcatcacagcccttctccttctttttctatgtgatggctacactttgctcactgttgtcttcatgccatgtcattttatacagtactttgtaggttttgatgagaaagttggtatttttaatgcactcaaaaattgctttttattggagagtacttatcaatataactttctgatcagttaattaagataaaaggcatacattgtccacaggtgagaggattaaatcagttagcattatttttttctgtttgtaaaaggaaaaacttattaaatttttaaacggagttattaaacagagtttcactcttattgcccaggctggagtgcaaatatattgtggcaaatataaaatttgctagaaaatacatcttagaaattaagttataagagagcaaatggtaagtgaagaattttaaatttaattttctatgatatagcataacatacatttccatgcagaatcttttatttttaaatgtgaaatttaaaggttgcaaaataataaaatgacttctgtggatttgatatttggaatgatatttcttttttatattgatattacaattccgaggaatttttcactcattatttttttagtgggtgaaggtgagtgtacagttattgctttttgtcacctaactatagtcagcttcttggtcattttctctagaaaacttttgaagattatggcagctttttgattaaacattttctgttatttttatgcaaattcatttattgtgttcacagggtggccagtcatgagaccataagcaacagctgcccttttagtgtctttcatgccattaccatctgtaataaataaatgtgtactttattctgcaaaacatgatgtttggaagtatatgttgtcaaatgcttaattctaggtaattaaggctttacctcacatcgttaacatttttgtggtcagagtatgtgacattgtcaatgtttttcaaaaacacaactacattattatgatctgtagtcactatgctgtacaaaaagatctcttaaacttattcctcctattaaactataattatgtattctttgaccaacatcttccaaaaccccccttttttctaaataccttggtgtctggtggtcaccactttactctctactttaatgggattaagtttcttagaatccctgtgtaagtaaaatcatgaaaaataatctttgtgtctggctcatgtagacaaatatgatgtcctccaggttaattcatgtgattgaaaataatagaaatttcttttttaaagacgaagagtattccattgtgtatatgtaccacattgtctttatttactcataaatgttgaactgttgattgtgtattttggtaattgtgaagagtgttgcaaacaacatagaagcataaatgtttcttcattctgatttcacttgttttggatatatacagtaaaattgctgtattgtggtttaattttaaattttttgacaaatttttgtttttcatagtgactctcctcattcacattcaaaccaacagtgtgcaagcattccttttcttcatactttgactaacactttcttttctttttagtaagagtaattctaacaggagtgagttgataatctcctggtttttctttttgctttcctgattatagttgatattgagcattttttatatatcttgaccatttgtcttttcttgaaaaatatttaagccttttgctcatttttaatagttatttgtcttctgttgtatagtcatttaagttgtttatatgtttctgttattaaccctttgtcccacgtatgatttgcaaatattttctcccatttttttcagttgtctcattttgttgattgtatcagattccatgaagcagctttttaatttcaagtaatctaacgtatctatttttcttttgatttccttggattttgaggttaaataataaaagtcacagcctaga

SEQ ID NO: 62 - protein, 483 aa, Homo sapiens
MKRHEMVAKHLVMFYYFAQHLWPEQNIRDSFQKVTLRRYRKCGYENLQLRKGCKSVVECKQHKGDYSGLNQCLKTTLSKIFQCNKYVEVFHKISNSNRHKMRHTENKHFKCKECRKTFCMLSHLTQHKRIQTRVNFYKCEAYGRAFNWSSTLNKHKRIHTGEKPYKCKECGKAFNQTSHLIRHKRIHTEEKPYKCEECGKAFNQSSTLTTHNIIHTGEIPYKCEKCVRAFNQASKLTEHKLIHTGEKRYECEECGKAFNRSSKLTEHKYIHTGEKLYKCEECGKAFNQSSTLTTHKRIHSGEKPYKCEECGKAFKQFSNLTDHKKIHTGEKPYKCEECGKAFNQLSNLTRHKVIHTGEKPYKCGECGKAFNQSSALNTHKIIHTGENPHKCRESGKVFHLSSKLSTCKKIHTGEKLYKCEECGKAFNRSSTLIGHKRIHTGEKPYKCEECGKAFNQSSTLTTHKIIHTEEKQYKCDECGKAST

SEQ ID NO: 63 - DNA, 6987 bp, Homo sapiens
agtgccatttcgcctttatcgtggtggagtccaccctggctgtggacctattcaaactcagtctgtctcttgactggaggaggagaaggaaaagttgagcacattgccaaccggagttccccaagaatggcaagttaaaaccaaagtgtcagcacctcaacaacatttttttttggcttaacaaaacatcaaacggcatacaaatggcagaaatccacaatggaggggaactctgtgactttatggaaaatggagaaatcttcagtgaacactcatgccttaatgcacacatgggaactgaaaatacaggggacacttatgactgtgatgagtatggagaaaactttcccatgttacacaacagtgcccctgctggagagacactttctgtgttgaatcagtgcagaaaagccttcagcctgccaccaaatgttcaccagagaacgtggataggagacaaatcctttgaatacagtgactgtgaggaagcctttgttgatcagtcacatcttcaggcaaataggataactcacaatggagaaacactctatgaacagaagcaatgtgggagagcttttacttactccacaagccatgctgtgtctgttaaaatgcatactgtagaaaaaccctacgaatgtaaggaatgtggaaaattctttagatattcttcatatcttaatagtcacatgcgaacccatactggggagaaaccctatgaatgtaaggaatgtgggaaatgcttcactgtttcttcacacctagttgaacatgtaagaattcatactggagagaaaccttatcaatgtaaggaatgtggaagagccttcgctgggcgctcaggccttactaaacatgtacgaatacacactggagagaagccctatgaatgtaacgaatgtgggaaagcctacaataggttttatctactaactgaacattttaaaactcacacagaggagaagccctttgaatgtaaggtatgtggaaaatccttcagaagctcttcatgccttaagaatcactttagaattcacactggaataaaaccctataaatgtaaggagtgtgggaaagcattcactgtttcctcaagcttacataatcatgtaaaaatccatactggagagaagccctatgaatgtaaggactgtgggaaagcctttgctacatcttcacaactcattgaacatataagaactcacactggagagaaaccgtatatatgtaaggaatgtgggaaaaccttccgtgcttcttcacatctacagaaacatgttagaattcacactggagagaaaccctatatatgtaacgaatgtgggaaagcctacaatagattttatttacttactaaacatttaaaaacacactgaagaaaaactctgaatgtaaggaatgtggaaatcttttaggaatttctcataccataattaccacatttgaattcacactgaagagaaattttattggtacaaagaatgtgaggaggccttcagttatccccattcacttcgaagacatgaaagaactcatactctatgtgtcccctataaattttaggaatgttagggagccaatggaatctttttttattattttattttattttattttattttattttattttattttattttatttgagacagagttttgctgttgtcatcacacaggctggagtgcaatggcatgatcccagctcactgcaacctttgtctcctgggttcaggcgattctgcctcagccttcaagtagcttggattacaggtgccgtcaaccacacccagctaatttttgtatttttagtagagatggggtttcaccatgttggccaggctggtctcgagctcctgacctcaggtgatccacccgccttggcctcccaaagtgctgggattataggagtgagccactgctcctggccttttttttttttttttttttttttttttttttttgtaagtcgttgttaatacacattcttttctcaagggattggattgtggtcacaatccaacatttgagaactcaccatggggccatacaatgtagaaaacacagaaagccctcattatttccttaggcctttctaagtatataagatgttgcaatggagaagagaaaccctattgatacaagatacaggcatgccctgtagatattgtgagttttgttccagactaccactataaagtgaatatcacaataacatgaatcatacaaatgttttggtttcccagtgcatataagttaggtttacatcatatggtagtctcttgtgtgcagttgtgttatgtctaagtaaagtaccttagtttaaaatactttattgccaaaaagtgctaatgatcatgtgagactttggtgagttgtaatctttttgcttgtggtaggtcttgcctcagtgttgatggctgttgatcagggtggctgtggcagtttcttaaaataagacagcagtgaagattgctgcattgattgactcttcattacatgaaaaacttctctttagcattcgacgctgtttgataacattttacgcatagtggaacttcttttagaattggacttaatcctctcaaacttcgccactgcttgatcaactaagttgatgtaatattctaagtctgttgtcttttcaacaatgttcacagcatcttcaggagtagatttcatttcaggaaaccactttctttgcttatctatacaaagcagcctctcatctgttcaagttttttcacgagattgaaacaattctgtcacatcttcaggctccacttctaattctagttctcttttttccatcacatccacagttactttttccactgaagacttgaacccctcagagtcacctatgaaggttggaatcaacttcttccaaactctggttaatgttggtttttatttttttaattaaaaaaattttttttagagacaaggtctcgctgtgttgttcatgctggagtacaagtgggtattcaccagcacgatgagagcacactgtagccttgaactcctggcctcaagtgatcctccttcctatgcctcctgagtagccaagactccaggcacacaccaccacacctgccttaatgttgatattttgacctccttccatgaatcataaatgttgttaatggcatctagaatggagaatcctttctgcaaggtctgcaacttaatttatccagatccctcagaagaagcattattagtggcagctatagccttatgaaatgtatttcttaaataataagacttgaaagtcagaattattccagaatccatgggctgcggttagcagacatgaaaacgccaatcttgtttatacctccataagagctcttggttagtaggttcattatcagtggtaatattttgaaaggaatctctgaacagtatgttttacagtgggcttaaaatattcagtaaaccatgctgtaaatagatgtaaatagataccacaggaagagtagatgtagcataattcttaactggctcttggatttttggaatggtaattgaatattagcattcatttaaagtcaccaactgcattgacctctaacaagaaagccagcccaggctgggaaaagtggcttacacctgtaattccagtgctttgggaggctgaggttggaggatcacttgaggtcaagagttcaagaccagccagcacaacagagcgtgacgctgtctctacaaagtaaagagtcagcccgtcctttgaatctttgaagtcagatattagcttacctagagctgtgaaagtcctaaatggcatctcctgaagtaaggctgttttgtctctgttaaaactctagtagagctacctctgccatttatctagatattctggaaatgcttgctgcagattccacatcagcaattgctacttcactttgtacttttatgttatggaaatgacttgttaaacctcacgaactgatctttgccagcttccagcatttcttctgcagctaactcacctctcagccttcatagaattagagttagggccttgctctggattaggttttggcttaagggaatgttgtggctggtctgatcttctatccagaccactaaaacttattccgtgttagtggtgaggctgttttcctttcttattatgtgtgtgttcactggagtagcacttttagtttccttcaagaactttacattcacaacttggctaactggcacaagaggcctagattttggcctatcccagttttttttttttttttttttttgagacatggtctcccttttgcccaggctggagtgtagtacagttatagcccattgcagcctcaaacttacgggttccagtgatcttcctgtctcctgagtagctaaagactgcaggtgtgcaccaccatggccagctaatttttttttttttttttttttttttttaaagaggcaggactttactgtttacccggctgatcttgaacttaaaacctcaagtgatgctcccctatctgcctcccaacactctgggattacaggtgtgagccactgcacctggctcttatcttggcttttgacatgactttctcactgaggttaatcatttccagcttttgatctaaagtgagaaatttgcaactccttctttcacttgaacagttagaggccattgtggggtaatgaattggcctaatttcaatattgtccctcagggaattaggaggcctgggaagaggaggagagaggggagagtggccagttggtggagcagtgagaacatagcatttgttaagtttgctgtcttcgaaggttgtggtttgtggtaccccaaaacaattaaaataggaacatcaaagatcacagagcagccgggcacggtggctcacacctgtaatcccagcaccttgagaggctgaggtgagtgaatcatgaggtcaggagttcgagaccagcctggccaccatggtgaaaccccgtctctactaaaaatacaaaaaattagccgggcatggtggcaggcacctatagtcccagctattcaggaggctgaggcaggagaatcacttgaatccaggaggtggaggttagagtgagctgagatcacaccactgcactccagcccaggtgacagagtgagattccttctcaaaaaaaaaaaaaaaaaaaaatcacacagcaccacagtaagtataataataaggaaaatgtttgaaatattgtcagaattgtcaggatgtgagagacaaagtaagcacatgctgttggaaaaaatggtgttatagatttattcgacatgacattgccacaggacttctacttgtgaaaaatatctgtaaagtgagatgaagcaaagtgaagtaacatgaggtatgtctgtagctgttgctgtagtggtttccaaatggtggttttcttttccttttttttttttttctttttggtctgcattggggtcttgctctgttgcctagggtgtggagtgcggtggcatgatcatgcctcactatagccttgacctcctgggctcaagcgatcctcccacctgagtctcctgagtacctgggaccacaggcacatgctaacgcacccacttaatttttttattcgtagagccgaggtctcactatgttgcccagactggtctcaagctcttgggctcaagcagtcctcctgcctcagcctcccaaagtgccaggattacaggtgtgagccaccacacccagtccaaaaagtgattttctaattccatagtttcttctacatttcttaactggaattttgtaaggaagagttatccttattcatttatttacccatttacttgtaggagcatgtatcataaattcttaatctatggggtgtagttagctactgtaaatttgatgcacatatttttccagattcaataagtaggatccccatcaagctatcttctgaatctttaaaaatgtattctccttatttcatgggtatataattattttctgggcaacagtttgttcatggtacatttgtctccagccctagactcagaaaaatgtaatttattttaatggagaatactatttagaagctgcagtctctgtgtagggaggtgttcctaggtaatagtgccctggcttttaggtcttctctatggaggatatggcaaagacatacaaaattatatatacgtatccacacattaataactctatttctatattaaaaacatgaccacaagccaacacttttaattccactgcagcactgctgggttatttcttgctttccaaattcccttgtctgtagctatctttcatcacttgcaaaaatagcacgtgctcaatcctagattaaaatataagctactctcagaattgataactcataccactctttttaaaaatcaactaaccagaattcagtttttattcacagttcttatctttagctcagggcgtaatataaaagcactaggtttaaaacttacttggtcagcagcaatccacttctaggtacatgtccaaaggaactgaagaaagcatctcaatgtgtgaatgcctacctgtgttcattgcagcattattcagaagagccaagaggtggaagcaaagtaaatgtccattgacagatgaattggtaaacaaaatgcattatatacatacaatgcaatatcatttagccttaaaaacaaaattctgccatatgctacaacatggacgttatgctaagtgaaataaaccagttccgaaaggacaaatacacccatttccacttatatggggtatctaacgtcaaactcagaagaacaaagtactgcggtatttgccacaagctggtggaggagaaaatgagttgttcaatgggtattgagtgtcagccacgcaagatggaaaagctttttgagatttgttgtataaaaatatgcctatagttaacaatactcttcggtacacacaaagtatgtgaaagggtaaattttatgtgtttttatcacaataaaaattgtaataaaagaa

SEQ ID NO: 64 - protein, 390 aa, Homo sapiens
MAEIHNGGELCDFMENGEIFSEHSCLNAHMGTENTGDTYDCDEYGENFPMLHNSAPAGETLSVLNQCRKAFSLPPNVHQRTWIGDKSFEYSDCEEAFVDQSHLQANRITHNGETLYEQKQCGRAFTYSTSHAVSVKMHTVEKPYECKECGKFFRYSSYLNSHMRTHTGEKPYECKECGKCFTVSSHLVEHVRIHTGEKPYQCKECGRAFAGRSGLTKHVRIHTGEKPYECNECGKAYNRFYLLTEHFKTHTEEKPFECKVCGKSFRSSSCLKNHFRIHTGIKPYKCKECGKAFTVSSSLHNHVKIHTGEKPYECKDCGKAFATSSQLIEHIRTHTGEKPYICKECGKTFRASSHLQKHVRIHTGEKPYICNECGKAYNRFYLLTKHLKTH

SEQ ID NO: 65 - DNA, 2776 bp, Homo sapiens
gcccggcctttgtctctcgtgcccgcacgtgcgtgtctcggtcagtagccctgcgcttctccttcactctcggcggttcaggaggctctgccgcagccggggccctcctgtgacctgcatgtactgggggattcgcagggaggatgtcgggacaccccggaagctgggaaatgaactcggttgcctttgaggatgtggctgtgaacttcacccaggaggagtgggctttgttggatccttcccagaagaatctctatagagacgtgatgcaggaaaccttcaggaatctggcttccataggaaacaaaggggaagaccagagcattgaagatcagtacaaaaattcttcaagaaatctaaggcacatcatatctcattctggaaacaacccatatgggtgtgaggaatgcggaaagaagccatgtacatgtaaacaatgtcagaaaacttccctttctgtcacaagggttcacagagacacagtaatgcacactggaaatggacattatggttgtacaatatgtgagaaagtttttaatattcccagttcatttcagatacatcagagaaatcacactggagagaaaccctatgaatgtatggaatgtgggaaagccttaggtttttcccgttctcttaatagacataaaaggattcacactggagaaaaacgctatgaatgtaagcaatgtgggaaagccttcagtcgttccagtcaccttcgtgaccatgaaagaactcatactggagagaaaccctatgaatgtaagcactgtgggaaagccttccgttactccaattgccttcattaccatgaaagaactcacactggagagaaaccttatgtgtgcatggaatgtggcaaagctttcagttgtctcagttccttgcaaggacatataaaggctcatgctggtgaagaaccctatccatgtaagcaatgtgggaaagccttcagatacgccagttcccttcagaaacacgagaaaactcatattgcacagaaaccctatgtatgtaacaattgtggtaaaggcttcagatgttccagttcccttcgtgaccatgaaaggactcatactggagagaaaccctatgaatgtcagaaatgtggcaaagcctttagtcgtgctagtaccctttggaagcataaaaaaactcatactggagaaaagccctataaatgtaaaaaaatgtaaaggctttaatcactacagtttttgtcaaaaacatgaacagtcacatacttgagagaaactgtgaatgtaaggtgtaggaaagtacttaattttcccagatttcctcaaatacatgaaacgaatcaaactggagataaaccctatgactataagcaataaggtaaagcattcaatttttccatttctttttgaaaacttgaaaggactcactgaagaaaatccatatgaatgtttaaaatgtggtaaggcctgcagttgttccagtggtatttgatggtataacataactcattctagagaaaaactttatgaaggtatcgaatgtgagaatgccttcatttatcctataactcactcagagacacatggtaacacatactccagattgaccttataaataaaagaatgcccaccagattgaaatcctagaaatacagaaaattctgaattttaacaattactttaaaggtcatgtgaaaactcccactggaaataaatcctgtaaatgtaaatattatggaaaaccttatggaaaataattatagtacaattctcaagaaaattcactatgtgaatgagatgttttaggagctataaataaattgaatatattggttgctcatttttgaagagagtctctagaatatagattttcacttcttttgaaaaaaaaaaaattgaggtgagacttttttttttttttttgagatggagtctcactttgtcgcccaggctggtgtgcagtggcacaatctcagttcactgtaagctctgcctcccaggttcacgccattctcctgcctcagcctcctgagtagctgggactacaggtgcctgccaccatgcccagctaattttttgtatttttagtagagatggggtttcaccgtgttagccaggatggtctcaatctcctgacctcgtgatccgcccgcttcagcctcccaaagtgctgggattacaggcgtgagccaccacgcccagctgaggcaagacttctgtaagtattcttcaagcagtagtacaagagttaaatatgtattcttcttttttaagctggtaaataaatttcctttttctacccattttaaagtgtgttggttatatgggtaaattgaaatgtatttcttttccttttttcttgcatagccattttaaaaaatattttttaaatatttaaagtataaaatatttttaaaattttttaaaaattttgtgggttacacagtagatgtgtgaaatgtatttgtaggtttaacttctgtgtagtttaattattttgttattaattggccattgataaatgagtctattttctttgctaatagagttgctgtcaatttgtaagtatgtaaagtttattatagagtatattctcacgtgaattattattttcatctgttgttctttacattgtcattatttttggctatttgcataggtaacattggtttaaggagagagacctgtgatcgaacagtgtcttgtgtctaatctgagaaagaaagcatccagtcttatcatcatgtatgatgttagctgagggtttttaaaataaattccttaaagcaggttga

SEQ ID NO: 66 - protein, 351 aa, Homo sapiens
MSGHPGSWEMNSVAFEDVAVNFTQEEWALLDPSQKNLYRDVMQETFRNLASIGNKGEDQSIEDQYKNSSRNLRHIISHSGNNPYGCEECGKKPCTCKQCQKTSLSVTRVHRDTVMHTGNGHYGCTICEKVFNIPSSFQIHQRNHTGEKPYECMECGKALGFSRSLNRHKRIHTGEKRYECKQCGKAFSRSSHLRDHERTHTGEKPYECKHCGKAFRYSNCLHYHERTHTGEKPYVCMECGKAFSCLSSLQGHIKAHAGEEPYPCKQCGKAFRYASSLQKHEKTHIAQKPYVCNNCGKGFRCSSSLRDHERTHTGEKPYECQKCGKAFSRASTLWKHKKTHTGEKPYKCKKM

SEQ ID NO: 67 - DNA, 4924 bp, Homo sapiens
gcggtggacatcttgtcggctcttaggtggaaccatcggagcagaagctcggggttgctgggcggttccgaggtgacggaagcgggagggtgcgggagaagtcgctgttcgctctgcggagtggctcgccagcgaagaccccgcctgcgcccccggggacggacgaccgcggtgccagggtcccgcgacctgggaccccctcgcggctccgggtggtctacgaactgtgatggcggcggccgcggtgatgggcccggcgcagatcctctgtggttgttgaattgtaacaagagagagaactctggctgcctgagagggcatgactctagtcacagcaggaggggcttggacaggccctggttgttggcatgaagtgaaggatgaagagtcatcttctgaacagagcatttctatagcagtgtcacatgttaatacttccaaggcaggtttgcccgcacagacggctctcccttgtgacatatgtggccccatcttgaaagatattttgcacctggatgaacaccagggtacacaccatggactgaaacttcacacatgtggggcatgtgggagacaattctggttcagtgcaaaccttcatcagtaccagaagtgttacagtatagagcaacccttaagaagggataaaagtgaggcctcaattgtgaagaactgcacagttagcaaagaacctcatccgtcagagaagccctttacgtgtaaggaggagcagaaaaacttccaggctactttgggtggctgccaacaaaaggccatccacagtaagaggaagacacacaggagcactgagagtggggatgcatttcatggtgaacaaatgcattacaagtgcagtgaatgtgggaaagctttcagccgcaaagacacacttgtccagcaccagagaattcatagtggagagaagccttatgagtgcagcgaatgtgggaaagccttcagccgcaaagctacacttgtccagcatcagagaatccatactggagaaaggccttatgaatgcagcgaatgtggaaaaaccttcagtcgaaaagacaaccttactcagcacaagagaatccacactggagaaatgccttataagtgcaatgaatgtgggaaatattttagccatcactccaatctaattgtacaccagagagttcacaatggagcaaggccttataagtgcagtgattgtgggaaagtcttcagacacaaatctacacttgttcagcatgagagtattcacactggagaaaatccttatgattgcagtgattgtgggaaatcctttggccacaaatacaccctcattaaacatcagcgaattcacactgagtcaaagccgtttgagtgcattgaatgcgggaaattctttagtcgaagttctgactatattgcacaccagagggttcacactggtgaaaggccttttgtgtgcagtaaatgtgggaaagactttatcagaacctcccaccttgttcgacaccaaagagttcacactggagaaaggccatatgagtgcagtgaatgtgggaaggcctacagcttaagctcccacctcaatcggcaccagaaagttcacactgcaggcaggctttaggagtgctttgaatacaacaggactcatcaatcagatgttgaatttcatgtatctgaacattgacacaaaggagataccttatggtgccaggtacgtgggaaccttctagggatatgttgcactttctgacttgctcaggttttttgccagagttatgtcactgtcaatccatgtggccgaaaccatcttaactctaccagctaagataccccagcattggggaaggcagggttttgtattgtccagtccctggagaaaatcatgaaatgcctgagttcattgggggtcctcattcccttctgtatgacaggtataggtatggatatgacccatttttagccaagagggtctgagctgtatctgctggtggcttatacaaaaagtttactttcttcatggatattcttggtctcacatacttgtaatcaagtttttccagcctccaagtcacctggcctgggaaagtacttgcctcatgttgctctggtttgtgataataaaggctttacagtttaagccacatttaatcttggggcttcttcttatggtctggggtggattgaaaacaggctctgccaaactgaagacagcctttgtgcggtgcctccaactttgcctcaaatgggacagtgggttgagggagaacagttcttagtccagttttgatgttaacttccatagctgacaaagcttgttaagtaagaattaagatcttgtgtagacctgatttgtctggattttagagttatttgagagcccatatttcaccttgaggagggtgctgctgctgtgacagcctgcagtgttttgaaacagcatggattgggtgtcttgtttgcagcatgtgtcccatgttccccaacactgttgagggaaagctgttcctcaggacctgctgagtggccatattccctgaaggcctgaatctgtttcacaggccactgttggtaagatctaaagcatccagtagggaaacaaaattgataaatattgagtgtgagtaattgggattggggagattgtggcaaactagaggggaagtgcccattgtaaaaacacatccacagacagtccaggcactaaggctgaatgggatcagggtatccagaaatctcaggatctccagggccatgttactgttaggtcaaggtcactggtgcagcaacgaatgtagtttttctagattcctctccctccctgggctctttacctaatgtctttgcggcacaggcggtaaccctgggagtaaagaggtgtggtccaaggaagtagcttttgtgaccagctggagtttctggtgactcttttggcaatggtcctcattgtttgccagtttttcttactactgaggaagagattgtcttcccaagatatttggagtgataagagtcaccatagtgaggtagagtcactcttagtgatgtccagttgtccagtttccaatagaagtgggagatccagatttttaaatgggataactttttataggttcactgaggtgtaatcaacatgcaatatattgcacatatttaaagtgtacgagttaagtcttgatacacacacacacacacacacacacacacacacacacacttgaaactatcaccctatcagtggtattggacatatctgttacccccaaagttaacctgaggcccttaacctttctctcagtgctcgccttcccccagaatccctaggcaaccactgagtagttttcactgtaggtaaatttgtcttttctagaattttatgtaagtctgcctataaagtgttaattttgcatgctgtctttcatgcaacataatttgaaatttgtccatggtatgtatgaacagtccattttaaaattactgagtcatattctgtatggatataccacagtttatccatttatcttaattgatgtctgtactccacccccatttttaaatattaaaaagctgctgcaaatattgatgcatgagtctttatgtggacacttagctgagaacatttttaagcagaggttttgaaggtgtgaccatatatcttactaattatagtaaaatatattggaaaagagatacatacagggaagaactgtgaaacagaaaagacctaagatttgatgatttgggaaattctcagcccatcttaattggaaaaaaaaaacaaaccattgaaattaagagattcattgttaggaaagatagatgttttagagagagagatgttttagagagatagccaaggatgtttgctgataccgggatcaaaacatacatcagaacactgtcacacaaaaagctctttgaagagattaaatgtgacttgtagatcccctcaatacaaacaatttataagaagtttaaactatcactcatctcagcaaaagccaaaaatatagataggggattccctaggaggaataatctgcataaacctcttttctaatgttgtgaatttcagtgatgtacaggagactcacaaaattcttgaaaattttataccagtggaaatgctcaccttgggtctaaagggaccttgaaagtatgaagttaaagggtgtaggcatgtaaagtgtgaagttaaaggttgtaatattctatacatgggactggctgcggaaacaggtgcaagcccttgctacctttcatgagaaaggaaggatgactcagagcagaggagagtccagtgggcagagtcctgaaccatgtgatattcccatgtcttgactcccagtggcatttgccaaactagatttcagattttcttgggattggtggttccattttttttgttttccccccttccatttcctccccttttgaaacaatgcatatacatataactattatcctaggtctttcccaaccttttgtttgggagcagataactagttttctagttttacagatccaaatgagacaggaatagcactgggtggtcacaggaggatggaaaatctcaacaccctggttttggtgcagctgaaaaaaaaaaagaaaaacccaaacaacagctaaaacgggaactaggcaaagaaaccgtgggataacagaaaacccaaaacaaaagagaaaactgccagaaccccagtcagggtgacatgtctgtaactcttccaggcaaacccaaataagggaggaggggtggtaatcaggggtccctgaaatcccctcttttcccagaatacctaatgattacccctattaaaggaacacccatacaattagaaacccaaactttgttttgcatgacttgctctcaggggcactcccacacttctctcttgtgtgtacttttgcttcacaataaaagctgcttgcctttgcttca

SEQ ID NO: 68 - protein, 427 aa, Homo sapiens
MTLVTAGGAWTGPGCWHEVKDEESSSEQSISIAVSHVNTSKAGLPAQTALPCDICGPILKDILHLDEHQGTHHGLKLHTCGACGRQFWFSANLHQYQKCYSIEQPLRRDKSEASIVKNCTVSKEPHPSEKPFTCKEEQKNFQATLGGCQQKAIHSKRKTHRSTESGDAFHGEQMHYKCSECGKAFSRKDTLVQHQRIHSGEKPYECSECGKAFSRKATLVQHQRIHTGERPYECSECGKTFSRKDNLTQHKRIHTGEMPYKCNECGKYFSHHSNLIVHQRVHNGARPYKCSDCGKVFRHKSTLVQHESIHTGENPYDCSDCGKSFGHKYTLIKHQRIHTESKPFECIECGKFFSRSSDYIAHQRVHTGERPFVCSKCGKDFIRTSHLVRHQRVHTGERPYECSECGKAYSLSSHLNRHQKVHTAGRL

SEQ ID NO: 69 - DNA, 2349 bp, Homo sapiens
gtctggcctgtgttggctgtaggcaacgaaaggagccctcccggtctgcgccggatggccccgggcggtgactcggtccggagccctggaacgctacgcccacctggcggaaagcaccacggaaacgcatccttctgtggccactgttaggtctgccattttacacttttctgatctcctccttcccttctgtgagctatgtctcaggggtcagtgacattcagagatgtggccatagacttctcccaggaggagtggaaatggcttcagcctgctcaaagagatttgtacagatgtgtaatgttggagaactatggccatctggtctcactgggtctttccatttctaagccagatgtggtttccttattggagcaagggaaagaaccctggctggggaaaagggaagtgaaaagagatctgttttcagtttcagagtcaagtggtgagatcaaagacttttcaccaaaaaatgtcatttatgatgactcatcccagtatttgatcatggaaagaattctaagtcaaggccctgtgtattccagttttaaaggaggctggaaatgcaaggatcatactgagatgctgcaagaaaatcagggatgtattaggaaagtaacagtctctcatcaagaagccctggctcaacatatgaatatcagtactgtggagaggccctatggatgccatgaatgtggaaaaacttttggtcgacgcttttccctggtgttacaccagaggactcatactggagagaaaccatatgcatgtaaggaatgtggcaaaacctttagccagatttcaaaccttgtgaaacaccaaatgatacatactggaaagaaaccccatgagtgtaaggactgtaataaaacattcagttacctttcatttcttattgaacaccagagaacgcacactggggagaaaccttatgaatgtactgagtgtggaaaggcctttagccgtgcctccaacctcactcgacatcaaagaattcacataggaaagaaacaatatatatgtaggaaatgtggtaaagcatttagcagtggctcagaactcattcgccaccagattacacatactggagagaaaccttatgaatgcattgaatgtgggaaggcatttcgccgtttctcacaccttactcgacatcagagcatccatacaaccaaaaccccgtatgaatgtaatgaatgtaggaaagctttccgttgtcactcattccttattaaacatcagagaattcatgctggagaaaagctctatgaatgtgatgaatgtggtaaagttttcacttggcatgcatcccttattcaacatacgaagagtcacactggagagaaaccctatgcgtgtgctgaatgtgataaagccttcagccggagcttttccctcattctacatcagagaactcatactggagagaaaccctatgtatgtaaggtatgcaacaaatccttcagctggagctcaaaccttgctaaacatcagaggacacacactcttgacaacccctatgaatatgaaaattcatttaattaccactcattccttactgaacaccagtgaatttacactgcaaagaaaaactatgaatgtatggaattttttaaaaagaagtataatgccttacttcagagaactcttggaaagaagccttatgtgaaagtgatgactgtgaagtaatatggcccacactttattcaccaccctggagaaaaaaaaacccaggaatatgtggaaaagccattaataaccactcttttatttttttgcaataacaaggtgaaatcaatattgttgagaagattcttccatctggtaatgttgagaagacttcatttggtaggagtcccttactttacgtgtgtaaattcctaccaggaaagaatacatatccaatagattggagaaagccagagattagccctcattccgcatctgtcaaccaggacagaaagcatggacaagggatgagctttacaaagatgatgcactttggagatcagaaaattcatatttaagcaaagtgatacaaacacagtgatttgggaatgccttcatttacaatgcaatacttacattttaatactcttgtaggagaaaaagcaactgtataaatgaatgtagagtgactttctgcaatatttcaaacctatatcagagaattacactgtgggaaaactaccattgtaataagtgtagcaaaatctccttagatatctgaaaagtcatactggatggaatctgtaggaaacggttctattttgagggaagggggattcctttttgttttttaagtgaattcagaaaatgttataaataaatcttttggtttattataaa

SEQ ID NO: 70 - protein, 457 aa, Homo sapiens
MSQGSVTFRDVAIDFSQEEWKWLQPAQRDLYRCVMLENYGHLVSLGLSISKPDVVSLLEQGKEPWLGKREVKRDLFSVSESSGEIKDFSPKNVIYDDSSQYLIMERILSQGPVYSSFKGGWKCKDHTEMLQENQGCIRKVTVSHQEALAQHMNISTVERPYGCHECGKTFGRRFSLVLHQRTHTGEKPYACKECGKTFSQISNLVKHQMIHTGKKPHECKDCNKTFSYLSFLIEHQRTHTGEKPYECTECGKAFSRASNLTRHQRIHIGKKQYICRKCGKAFSSGSELIRHQITHTGEKPYECIECGKAFRRFSHLTRHQSIHTTKTPYECNECRKAFRCHSFLIKHQRIHAGEKLYECDECGKVFTWHASLIQHTKSHTGEKPYACAECDKAFSRSFSLILHQRTHTGEKPYVCKVCNKSFSWSSNLAKHQRTHTLDNPYEYENSFNYHSFLTEHQ

SEQ ID NO: 71 - DNA, 4431 bp, Homo sapiens
agacccggaagtggatcgtgcggagcaagcatcacaccatggcgtatgagtgttcctctgtgtagactcaacctgcgcctcgccgtcccccattcgcacacccgatgcccgggggtcgctacggacttaaaatctccgcaccgcaccctccacctcagaaacgttcctggatccgaacactgccccctgacgacctagagagatcccggctcccagcccactgagtggcttcagcctcgctggtaggtctctcctccaaagctctggaaacagactcctgggagtgagagggaggggagcgcaggcaccgccccctttccccaagtcccccgcccacttcatccctcaggcacctcccaactcctggcctctctgcacgaggcgcctgccccgggccccgcctacaggggacccagctcttcttgcagccactggaagctgatcacctggagtgaagacctcacacgaagaagtctggaagaagaggaagaggaaagaaaaggagtcagggatggcccttactcaggtacggttgacatttagggatgtggccatagaattctctcaggaggagtggaaatgcctggaccctgctcagaggatcttatacagggacgtgatgttggagaactactggaaccttgtttctctgggactgtgtcattttgatatgaatattatctccatgttggaggaagggaaagagccctggactgtgaagagctgtgtgaaaatagcaagaaaaccaagaacgccggaatgtgtcaaaggcgtggtcacagatatccctcctaaatgtacaatcaaggatttgctaccaaaagagaagagcagtacagaagcagtattccacacagtggtgttggaaagacacgaaagccctgacattgaagacttttccttcaaggaaccccagaaaaatgtgcatgattttgagtgtcaatggagagatgacacaggaaattacaagggagtgcttatggcccagaaagaaggtaaaagagatcaacgcgacagaagagacatagaaaacaagcttatgaacaatcagcttggagtaagctttcattctcatctgcctgaactgcagctatttcaaggtgaggggaaaatgtatgaatgtaatcaagttgagaagtctaccaacaatggttcctcagtgtcaccacttcaacaaattccttctagtgtccaaacccacaggtctaaaaaatatcatgaacttaaccatttttcattactcacacaaagacgaaaagcaaacagttgtggaaaaccttataaatgtaatgaatgtggcaaggcgttcactcagaattcgaaccttacaagtcataggagaattcatagtggagagaagccttacaaatgcagtgagtgcggcaaaacctttactgttcgttcaaatctaactattcatcaggtcatccatactggagaaaaaccttacaaatgtcatgagtgtggcaaggtcttcaggcacaattcataccttgcaactcatcggcgaattcatactggagagaaaccttacaagtgtaatgagtgtggaaaagcctttagaggacattcaaacctaactacccatcagttaattcatactggagaaaaaccgttcaaatgtaatgaatgtggcaagctcttcactcaaaattcacaccttataagtcattggagaattcacactggagagaaaccttacaagtgcaatgagtgcggcaaagcctttagtgttcgttcaagcctagcaatccatcagacaatccacactggagaaaaaccttacaaatgtaatgaatgtggcaaagtctttaggtacaattcatacctcggaaggcatcggagagttcatactggtgagaaaccttacaagtgtaatgaatgtggcaaagccttcagtatgcattcaaacctagctacccatcaggtcatccatactggaacaaaacctttcaaatgcaatgaatgcagcaaggttttcactcaaaattcacaacttgcaaatcatcgaagaattcatactggagagaaaccttacaagtgtaatgagtgtgggaaagccttcagtgttcgttcaagtctgactacccatcaggcaatccattctggagagaaaccttacaaatgtattgaatgtggcaagagcttcactcaaaaatcacaccttagaagtcatcggggaattcattctggagagaaaccttacaagtgtaatgaatgtggtaaagtcttcgctcaaacatcacaacttgcaaggcattggagagttcatactggagaaaaaccttacaagtgtaatgactgtggcagagcctttagtgatcgttcaagcctaacttttcatcaggcaatacatactggagagaaaccttacaaatgtcatgaatgcggcaaggtttttaggcacaattcataccttgcaactcatcggcgaattcatactggagagaaaccttacaagtgtaatgagtgtgggaaagcctttagtatgcattcaaacctaactacccataaggtcatccatactggagagaagccttacaaatgtaatcaatgtggcaaggtcttcactcagaactcacaccttgcaaatcatcaaaggactcacaccggagagaaaccttaccgatgcaatgagtgtgggaaagccttcagtgttcgttcaagcctaaccacccatcaggcaatccatactgggaaaaaaccttacaaatgtaatgaatgtggcaaggtctttactcaaaatgctcacctggcaaatcaccgaagaattcatactggggagaaaccttacaggtgtacagagtgtgggaaagcctttagggtaagatcaagtctaactacccatatggcaatccacactggagaaaagcgttacaaatgtaatgagtgtggcaaggtcttcaggcagagttcaaatcttgcaagtcatcacagaatgcataccggagagaaaccttacaaatgagtgtggtgaggtcattaggtacaattcactcctttcacatcagttaatttcattcttgacagaatccttacaaatgtagtgacagtggccaatccctcatgagttgaagcattaatagatatgagaggccataagcaagagacatcatgtaaacatatgtggcagagggtctatccaggcctcgcaggttactaggcatcaagatttatatctttgatgaaacgaaacaaatgtaatatgcatcctgaggccattacccagtgaccgatggtaagtgaggattcctaggaggaataacagtctctggtttccctgtttgcctttgatattatacactgtagaatactcacaagtccaaatatgctaaaaattatatatttttaactcacatacgaaaaggttgcaggatatttgtaggcagtcagttaccttcaccttatgaaatgtttcactgagttatttgaggttttttggaaagcctactattgcgtttcaatgtgaactttgaaatcttattgtgcatccttacacaccttccatggtgctttcttggaaagatcattgggatggaaggatcattgattgggtgaagatcattgattaggtgaaggattatttctatccaatttgtgaagaaggaggactttgcttttaaaattaagtatcatctgaattagcatttgggagtggcgaaaaacaatgtaaaactatgatgtcactcaccattctgataatgttcagggtgcctttctcctaccaggagagtactgtggcttagaggaaagaaatggtctatcaactgaacatgaaatggagcaggccaagaccttaggacattgggatttttgtgggaggagagtaataggtaattagacactgattgtgtggtagaaatactgcaggggaaaaggtcgccctcttatgcatcaaagagcaatacctgttgtttagcaaagagtgatgaaaaattgatcttgttttgaaattgaagagagaggccaggcgcggtggctcacacctgtaatcccagcactttgggaggctgaggcaggtggatcacctgaggtcgggagttcgagaccagcctgaccaacatggagaaaccccaattgtactaaaaatacaaaattagccgggcgtggtggcaggtgcctgtaatcccagctacttgggaggctgaggcaggagagtgcttgaacccaggaggcggaggttgtggtgagccaagatcatgccactgcactccagcctgggcaacaagaacaaaactccatctaaagaagaaaaagaaaaactgaagagagagtagttgtcagagtgaagagtttaatcaacagaagtagagtaacatattctttagtagaactcacattatctgcttgaagcacattttgctaatgttttattcagaatgtatcatagatataatgttttaactaataaaatagaatggtttttctcta

SEQ ID NO: 72 - protein, 818 aa, Homo sapiens
MALTQVRLTFRDVAIEFSQEEWKCLDPAQRILYRDVMLENYWNLVSLGLCHFDMNIISMLEEGKEPWTVKSCVKIARKPRTPECVKGVVTDIPPKCTIKDLLPKEKSSTEAVFHTVVLERHESPDIEDFSFKEPQKNVHDFECQWRDDTGNYKGVLMAQKEGKRDQRDRRDIENKLMNNQLGVSFHSHLPELQLFQGEGKMYECNQVEKSTNNGSSVSPLQQIPSSVQTHRSKKYHELNHFSLLTQRRKANSCGKPYKCNECGKAFTQNSNLTSHRRIHSGEKPYKCSECGKTFTVRSNLTIHQVIHTGEKPYKCHECGKVFRHNSYLATHRRIHTGEKPYKCNECGKAFRGHSNLTTHQLIHTGEKPFKCNECGKLFTQNSHLISHWRIHTGEKPYKCNECGKAFSVRSSLAIHQTIHTGEKPYKCNECGKVFRYNSYLGRHRRVHTGEKPYKCNECGKAFSMHSNLATHQVIHTGTKPFKCNECSKVFTQNSQLANHRRIHTGEKPYKCNECGKAFSVRSSLTTHQAIHSGEKPYKCIECGKSFTQKSHLRSHRGIHSGEKPYKCNECGKVFAQTSQLARHWRVHTGEKPYKCNDCGRAFSDRSSLTFHQAIHTGEKPYKCHECGKVFRHNSYLATHRRIHTGEKPYKCNECGKAFSMHSNLTTHKVIHTGEKPYKCNQCGKVFTQNSHLANHQRTHTGEKPYRCNECGKAFSVRSSLTTHQAIHTGKKPYKCNECGKVFTQNAHLANHRRIHTGEKPYRCTECGKAFRVRSSLTTHMAIHTGEKRYKCNECGKVFRQSSNLASHHRMHTGEKPYK

SEQ ID NO: 73 - DNA, 2714 bp, Homo sapiens
gcaacgcctcctggggttgtcaatatggctgcgttgggatctgttcaccttcaggctgagtcgagactgaggtgaaaaagcggaaaaacgcgagaaaaggtttccccgttgtacagaggctagagtgaggctcggttgaatcggttgcaggcgttggtgcctctgtcagcgtccaggtcactgccgctcccgccccgctcttccctggctgtgctggcggaggctgcgccgatgaacctgactgagggttcatagcagtggcagcaatgcttatggatgctggacaggattatatggtttttgaggacgtggccatacatttctcccaggaggagtggggaattcttaatgacgttcagagacacctgcacagcgatgtgatgctggagaactttgcacttttgtcctcagtaggttgttggcatggagccaaggatgaggaggcaccttccaagcaatgtgtttctgtaggagtgtcacaggtcacaactttaaagccagctttgtccacccagaaggcccagccctgtgagacatgtagctcacttctgaaggacattctacacctggctgagcatgacggaacacaccccaagcgtacagccaagctttacctgcaccaaaaggagcatcttagagagaagctcaccagaagtgatgaagggaggccttcgtttgtgaatgacagtgttcacctggcaaagaggaacctcacatgcatgcagggtggcaaggattttactggtgattcagatcttcaacaacaggctcttcacagtgggtggaagccacacagggacactcatggtgtggaggcctttcaaagtggacagaataattacagctgcacccaatgtgggaaagacttttgccaccaacatacactgtttgagcaccagaaaatccacacagaggaaaggccttatgagtgcagtgaatgtggcaaattgtttaggtacaactccgaccttattaaacatcagcgaaatcatactggagaaaggccttataagtgtagtgaatgtggaaaagccttcagcctcaaatacaatgttgttcaacaccagaaaattcacactggagaaaggccttatgagtgcagtgaatgtgggaaagcttttcttagaaagtctcacctacttcagcaccagaggattcacaccaggccaaggccttatgtgtgtagtgaatgtgggaaggccttccttacacaggctcaccttgttggtcaccagaaaattcatactggagaacggccttatggatgcaatgaatgtgggaaatactttatgtacagttcagcactcattagacatcagaaagttcacactggagaaaggcctttttattgctgtgaatgtgggaaattctttatggacagctgcacactcattattcaccagagagttcatactggagaaaaaccttatgaatgcaacgaatgtgggaaattctttagataccgttccacactcattagacatcagaaagttcacactggagaaaagccttatgagtgtagtgaatgtgggaagttctttatggacacttccacactcattattcatcagagagttcatactggagaaaagccttatgaatgcaacaaatgtgggaaattctttaggtattgcttcacactgaatagacatcagagagttcactctggagagaggccttatgaatgcagtgaatgtggcaaattctttgtggacagctgtacactgaagagtcatcagagagttcacactggagaaagaccttttgaatgcagcatttgtgggaaatcctttagatgtcgctccacacttgatacacatcagagaattcacactggtgaaaggccttatgagtgtagtgaatgtgggaaattctttaggcacaactcaaatcatattagacatcggagaaatcactttggagaaaggtcttttgagtgcactgagtgtgggagagtttttagccaaaattcccacctcattcggcaccaaaaagttcacactagggaaagaacttacaaatgcagcaaatgtgggaaattttttatggacagctccacactcattagtcatgagagagttcatactggagaaaagccttatgagtgcagtgaatgtgggaaagtctttagatacaactccagcctcattaaacatcggagaattcacactggagagagaccttatcagtgcagtgaatgtggaagagtctttaaccaaaattctcatctcattcagcaccagaaagttcacaccagataaagaatgtatatataaagcagatggggaaagacttcacacagaaatctactctgatttagcactgggacctacgttttaaaaaaagtattcttgtagaatacagataacataaaatctaacatcttaaccatgttaaagtgtatagttcagtactgttaagtcattcacattgtgcaatgaatatctagaagtcttttcaacttatgaaactaagtctataccttttaaaaccttattcctcactccatccagcctcttgacaagcaccgctctgtatgaattttactagtccgggtacctcatataagaaaacttaagttttggtcttcttgtggtttattttgtggcttattttgcttaacgttatatttttaaggtttcatgttctaatccattagaatttccatcctttttaaaggctgaataaaattctgttagtcatgtgttgcttaa

SEQ ID NO: 74 - protein, 664 aa, Homo sapiens
MLMDAGQDYMVFEDVAIHFSQEEWGILNDVQRHLHSDVMLENFALLSSVGCWHGAKDEEAPSKQCVSVGVSQVTTLKPALSTQKAQPCETCSSLLKDILHLAEHDGTHPKRTAKLYLHQKEHLREKLTRSDEGRPSFVNDSVHLAKRNLTCMQGGKDFTGDSDLQQQALHSGWKPHRDTHGVEAFQSGQNNYSCTQCGKDFCHQHTLFEHQKIHTEERPYECSECGKLFRYNSDLIKHQRNHTGERPYKCSECGKAFSLKYNVVQHQKIHTGERPYECSECGKAFLRKSHLLQHQRIHTRPRPYVCSECGKAFLTQAHLVGHQKIHTGERPYGCNECGKYFMYSSALIRHQKVHTGERPFYCCECGKFFMDSCTLIIHQRVHTGEKPYECNECGKFFRYRSTLIRHQKVHTGEKPYECSECGKFFMDTSTLIIHQRVHTGEKPYECNKCGKFFRYCFTLNRHQRVHSGERPYECSECGKFFVDSCTLKSHQRVHTGERPFECSICGKSFRCRSTLDTHQRIHTGERPYECSECGKFFRHNSNHIRHRRNHFGERSFECTECGRVFSQNSHLIRHQKVHTRERTYKCSKCGKFFMDSSTLISHERVHTGEKPYECSECGKVFRYNSSLIKHRRIHTGERPYQCSECGRVFNQNSHLIQHQKVHTR

SEQ ID NO: 75 - DNA, 2295 bp, Homo sapiens
acccagctcccggaagtgcgcccggagccggcgccgcgggccgagtgtcctggtgaagacctagttcttgccggagacaattccactgcagaagcactttacttaaaaggacttgccaggctggacaatgcccgttgacttggggcaggccctaggcctgctgccatcgctggcgaaggccgaggactcccagttctcagaatcagatgctgcccttcaagaggaactctccagccctgagaccgcacgccagcttttcaggcagttccgttaccaggtgatgtctgggcctcatgagaccttgaagcaacttcggaagctctgtttccagtggctacagccagaggttcacaccaaagagcagatcctagagatcctcatgttggagcagtttctgaccatcctgcctggggagatccagatgtgggtgcggaaacagtgtccaggaagtggagaagaggcagtgacccttgtggaaagcttgaagggggacccccagagactgtggcaatggatcagtatccaggttctaggacaggacatcttatcagagaagatggaatctccaagctgccaagtgggggaagtggagccccatcttgaagtggtgcctcaggagttgggacttgagaattcatcctcagggcctggggagcttctgagccacatcgtgaaagaggaatctgacacagaagcagaactagccctggctgcctcccagcctgcccgactggaggaaaggctgatcagagaccaggacctcggagcctcactgctcccagcagcacctcaggaacagtggagacaactggattccactcaaaaggagcaatactgggatctcatgctggagacctatgggaaaatggtctcaggagcaggcatttcccatcccaaatctgacctgactaattcaatagaatttggggaagagctggcaggaatataccttcatgtcaatgagaagatcccaagacccacctgcataggagatagacaagagaatgacaaggagaacctaaatttggagaatcacagggaccaggagctcctgcatgcttcctgtcaagcttcaggagaggttccttctcaggcttccttgaggggcttcttcactgaggatgagccaggatgctttggagaaggagagaatctccctgaggctctgcaaaacattcaggatgagggaacaggggaacagctgtctcctcaagaaaggatttctgagaaacaactaggtcagcatttgcctaatcctcattcaggagaaatgtccaccatgtggcttgaggagaagagagagacctcccagaaggggcagccaagagcccccatggcccagaagctccccacctgcagggagtgtgggaagaccttttataggaattctcagcttatttttcaccaaagaactcacaccggagagacatactttcagtgcaccatctgcaaaaaagcctttctgcggagttcagactttgtgaagcatcagagaactcacacgggagagaagccctgtaaatgtgattactgtgggaaaggctttagtgacttctcaggattgcgccaccacgagaaaatccacacaggagagaaaccctataaatgtcctatctgtgagaaaagtttcattcagagatcaaactttaatagacatcagagggttcacactggagagaaaccttataaatgttcgcactgtgggaaaagtttcagctggagctcgagccttgacaaacatcaaagatcccacttaggaaagaagccctttcaatagccagtaaccaaactctctttccccatttctatctcccagcccagtcacaaaaatactcagctccatcaagaggaattgtgtctaagaggatacccctgttaatctccttttttcttggattggagaggagagaatctggacatggctttggacttggaggatatcttggattggattgcacaatggcttaaattcttgattctgcctcaggagaaagaatagtcttcatgtttccactcatccttcctttggacccatcggggaaaaagtctaaattggagatccagttttagaagtgctttctgggaagcatttaatgggattagctgtagtcactgcttatgggaagaacctcagatcagccccttaaaatgagttctagagcaggtcttctgttccagaaggggagaagcatagagggcctgtgagctcacgtgtgttctttgtcataggggtgaaaaactaacttcaagtgtcccttgtttgaaataaacttagcagagtcactttctatctta

SEQ ID NO: 76 - protein, 549 aa, Homo sapiens
MPVDLGQALGLLPSLAKAEDSQFSESDAALQEELSSPETARQLFRQFRYQVMSGPHETLKQLRKLCFQWLQPEVHTKEQILEILMLEQFLTILPGEIQMWVRKQCPGSGEEAVTLVESLKGDPQRLWQWISIQVLGQDILSEKMESPSCQVGEVEPHLEVVPQELGLENSSSGPGELLSHIVKEESDTEAELALAASQPARLEERLIRDQDLGASLLPAAPQEQWRQLDSTQKEQYWDLMLETYGKMVSGAGISHPKSDLTNSIEFGEELAGIYLHVNEKIPRPTCIGDRQENDKENLNLENHRDQELLHASCQASGEVPSQASLRGFFTEDEPGCFGEGENLPEALQNIQDEGTGEQLSPQERISEKQLGQHLPNPHSGEMSTMWLEEKRETSQKGQPRAPMAQKLPTCRECGKTFYRNSQLIFHQRTHTGETYFQCTICKKAFLRSSDFVKHQRTHTGEKPCKCDYCGKGFSDFSGLRHHEKIHTGEKPYKCPICEKSFIQRSNFNRHQRVHTGEKPYKCSHCGKSFSWSSSLDKHQRSHLGKKPFQ

SEQ ID NO: 77 - DNA, 3328 bp, Homo sapiens
gtaggcgtggaaagaggttggcgcgctggaagtccagttgcttcggctccctgcgttaggtctggtggcggtcaatgcgcttccggacccgggatcagagtgtgtggatcgctatagggggaggggagctcaggtatcaccatggcaacagccagccctccggactcgtgacgtcacccttctgatttcgcgcttagaggcctctgcaggagaaagctggggagtcctcgaagggggcgcacctcgcctccttctgtgcggggcggtcccgccctgatcccttggagggctttgttcttttgttctggcctaaggggaagtcgggtgccgggccccgccctgtttgtccaccttccagctttaacgctctgcaacagggtagacaacctcagcgtgttgcagattccctgcaaggggagttagacatctgagtcctagaccgagataccagctgaaggaacgctgcctggcgaaccctggtgttcaagttccagaggaacgggatgagctcctgagatggaagatctgtcctctccagactccacccttctccaagggggacataatctactctcatcagccagttttcaggaagcggtgactttcaaggatgtgatagtggactttacccaggaagaatggaaacagctggaccctggccagagagatttgttcagggatgtgacattggaaaattatacacacctggtctctataggactccaagtttctaaacctgatgtgatttcccagttagagcaagggacagagccatggatcatggagccaagcattccagtaggtacctgtgcagactgggagacaagacttgaaaatagtgtgtcagccccagagcctgacatttctgaagaagagctatctccagaggtaatagtggaaaaacacaaaagagatgattcttggagttccaacttgctagaaagttgggaatatgaaggcagtttagagagacagcaggcaaaccaacagacactgccaaaggaaataaaggtaaccgaaaagacaatacccagttgggaaaaaggccctgtaaataatgaatttgggaaaagtgtcaatgtgagttcaaaccttgtaacacaagaaccatctccagaagagacctctactaaaagaagcatcaaacagaattcaaacccagttaaaaaagagaaatcttgtaagtgcaatgaatgtgggaaagcctttagttattgttcagctcttattcgccatcagagaacacatactggagaaaaaccctacaaatgtaatgaatgtgaaaaagccttcagccggagtgaaaaccttataaaccatcaaagaattcatactggagataaaccatataaatgtgatcagtgtggaaaaggcttcattgagggtccatctcttactcaacatcaaagaattcatactggagaaaaaccatataaatgtgatgaatgtgggaaagcctttagtcagaggacccatcttgttcagcatcagagaattcatactggcgagaagccatacacttgtaatgagtgtggaaaagcctttagccagagaggccactttatggaacatcagaaaattcatacgggagaaaaaccttttaaatgtgatgaatgtgataaaaccttcaccaggagcacacaccttactcaacatcaaaaaattcatactggagaaaaaacctataaatgtaatgaatgtggaaaggccttcaacgggccctcaacttttatccgtcatcatatgattcatactggtgaaaaaccgtacgaatgcaatgaatgtgggaaagccttcagccagcactcaaacctcactcagcatcaaaaaactcatactggggagaaaccctatgattgtgcagaatgtggaaaatcttttagttactggtcatcccttgctcaacacctgaaaattcatactggagaaaaaccttacaaatgcaatgaatgtggaaaggccttcagttactgctcatcccttactcaacatcggagaattcacacgagagaaaagccctttgaatgcagtgaatgtggaaaggctttcagttatctctcaaaccttaatcagcatcagaaaactcatactcaagagaaagcttatgaatgtaaagaatgtgggaaagcttttattcggagttcatctcttgctaagcatgaaagaattcatactggagagaaaccctatcagtgtcatgaatgtgggaaaaccttcagttatggttcatcccttattcagcataggaagatccatactggagaacgaccttacaagtgtaatgagtgtgggagagcattcaaccagaacatacaccttacacagcataagagaattcatacaggagccaagccttatgagtgtgctgagtgtggtaaagcctttcgacattgttcatctcttgctcaacatcaaaaaactcacacagaagaaaaaccctaccagtgtaataaatgtgaaaagacctttagccagagctcccatctaactcagcatcaacgaattcacactggggagaagccctataagtgcaatgaatgtgacaaagcctttagccggagcactcatctgactgaacatcagaatactcatactggagagaaaccttataactgtaatgaatgcagaaagacttttagccagagcacatatctcattcagcaccagagaattcattcaggagagaagccttttggatgtaatgattgtggaaaatccttcagatatcgctctgctctcaacaaacatcagagactgcatcctggcatatgacaattctaggaacatcataaatttaggggagatatttactttagtttgtccttttgttaagtactgaagaatcagagtggatttagaaactgccttgaaatcttttaaattttcactatcatgttatggaatggaaagtacattgggctgaactaatccaattgttattaagccactctgtgacattagaaaactctactgttttaagctttagtttcctttatggaatgaaggatttggagtagattatttcaaaggtagtttggagttttataatcagttttgtatatttacaatattttcttgaatgggtttactatacatcagcattttgctgtgttgcatctagaatgtgtatgtttatgcatgttttgccaatagaatttgtgcttcagtaactagatcggggatctagtatgctcctggtctaatgcatttacattgtttaggtaactggttcctaataaaaagaattataaaataccctcaaattaacaattcaattgcatataatagcctaactcagtaagaatattaaaacttactattattcttc

SEQ ID NO: 78 - protein, 751 aa, Homo sapiens
MEDLSSPDSTLLQGGHNLLSSASFQEAVTFKDVIVDFTQEEWKQLDPGQRDLFRDVTLENYTHLVSIGLQVSKPDVISQLEQGTEPWIMEPSIPVGTCADWETRLENSVSAPEPDISEEELSPEVIVEKHKRDDSWSSNLLESWEYEGSLERQQANQQTLPKEIKVTEKTIPSWEKGPVNNEFGKSVNVSSNLVTQEPSPEETSTKRSIKQNSNPVKKEKSCKCNECGKAFSYCSALIRHQRTHTGEKPYKCNECEKAFSRSENLINHQRIHTGDKPYKCDQCGKGFIEGPSLTQHQRIHTGEKPYKCDECGKAFSQRTHLVQHQRIHTGEKPYTCNECGKAFSQRGHFMEHQKIHTGEKPFKCDECDKTFTRSTHLTQHQKIHTGEKTYKCNECGKAFNGPSTFIRHHMIHTGEKPYECNECGKAFSQHSNLTQHQKTHTGEKPYDCAECGKSFSYWSSLAQHLKIHTGEKPYKCNECGKAFSYCSSLTQHRRIHTREKPFECSECGKAFSYLSNLNQHQKTHTQEKAYECKECGKAFIRSSSLAKHERIHTGEKPYQCHECGKTFSYGSSLIQHRKIHTGERPYKCNECGRAFNQNIHLTQHKRIHTGAKPYECAECGKAFRHCSSLAQHQKTHTEEKPYQCNKCEKTFSQSSHLTQHQRIHTGEKPYKCNECDKAFSRSTHLTEHQNTHTGEKPYNCNECRKTFSQSTYLIQHQRIHSGEKPFGCNDCGKSFRYRSALNKHQRLHPGI

SEQ ID NO: 79 - DNA, 3187 bp, Homo sapiens
acttcctgtccccgcggctctgtgtcccctgctagccgtaggtcgtgtgacccgcaggcaccgggagatccagaagtgaaacgccaggctctctggaggccaggagatgactctgttgacgttcagggatgtggccatagaattctccctggaggagtggaaatgcctggacctcgctcagcagaatttgtacagggatgtgatgttggagaactacagaaacttgttctccgttggtctcactgtctgtaagccaggcctgatcacctgcctggagcaacgaaaagagccctggaatgtgaagagacaggaggcagcagacggacatccagagatgggatttcaccatgctactcaggcttgtcttgaactcctgggctcaagcgatctgcctgcctcagcctcccaaagtgctgggattacaggtgtgaaccaccgtgcccagccaggcctcaatgtttctgtggacaaattcactgcactgtgctcacctggggtgctgcaaactgtgaaatggtttttagagttcagatgcatcttctcactagctatgtcttctcattttacccaagaccttctgccagagcagggcatacaagatgcattcccaaaaagaatactgagaggatatggaaattgtggccttgataatttatatttaaggaaagactgggaaagtttagatgagtgtaagttgcaaaaagattataatggacttaaccaatgttcatcaactacccatagcaaaatctttcaatataataaatatgttaaaatctttgataacttttcaaatttacatagacgtaatataagtaatactggagagaaacctttcaaatgtcaagaatgtggcaaatcctttcaaatgctctcattcctaactgaacatcagaaaattcacactggaaaaaaattccaaaaatgtggagaatgtggcaaaacctttatccagtgctcacactttactgaacctgagaacattgacactggagagaaaccttacaagtgtcaagaatgtaacaacgtcattaaaacttgctcagtccttactaaaaatagaatttatgccggaggggaacattacagatgtgaagaatttggcaaagtatttaaccagtgctcccaccttactgaacatgagcatggtactgaggaaaaaccctgcaaatatgaagagtgcagcagtgtctttatctcttgctcaagcctttctaatcaacagatgattcttgctggagagaagctctccaaatgtgaaacatggtacaaaggttttaaccacagcccaaatccttccaaacaccagagaaatgagattggagggaaacctttcaaatgtgaggaatgtgacagcatcttcaagtggttctcagaccttactaaacataagagaattcacactggtgagaaaccatacaaatgtgacgaatgtgggaaagcctatacacagtcctcacacctcagtgaacacaggaggattcacaccggagagaaaccctaccaatgtgaagaatgtgggaaggtcttcagaacttgctcaagcctttctaaccataagagaactcattctgaagaaaaaccctacacgtgtgaagaatgtggcaacatctttaagcagttatcagacctcactaagcataagaaaacccatactggagagaagccctacaaatgtgacgaatgtggaaaaaactttacccagtcctccaaccttattgtacataagagaattcatactggagagaaaccctacaagtgtgaagaatgtggcagagtcttcatgtggttctcagacattaccaaacataagaaaacccatactggagagaaaccctacaaatgtgacgaatgtggaaaaaactttacccagtcctcaaaccttattgtacataagagaattcatactggagagaaaccctacaagtgtgaaaagtgtggcaaagccttcacccagttctcacacctgactgtacatgaaagcattcatacttgagaaaaaaataaacaaatataaaaataggcaaagccgttagtatctgctcgcatcccactttacatcagagttcagacttaataaagttatcataaatgtaattactattgaaagacctttcatgaaatataagtctccagagcacacaagagtatttcttctgaaaaaaatgttacaattatactagatggaagacttgcatcagttgcttaaactttcagaaaatttgtagagaaacccaacaaatctcataaatgtggaataacatttgttcaaaaatgatagcttagaaaacactagagttcatactaaaagatattttgcaaatacactaaatgggaaaaataagcaaggacacgttcagaaatgacactgaatccctgtgttgagtctacagagacatctagacttaaaatagatcatttatatttaagtttaaaaggaggatgagactgagtttttgtagagttataattacattcaaaatatacttttttgcattgaaaaaatgttaaatttttgaaaagcgaatattgatgtcattctattctcaaatcagtagatgctgtgtcttcatttctagtgctgatgtgaaaacacatggtcagttgttgctgcgtcagagatatgagaaattcttttctcttaggtgtgcatcactgatatacttgtccgtgaaaggtgaaagacactgaaatgtaagatgcgtgagtaaaatcttggtagagaggctctttgtggttgttttatatacttgtaagtgatttatgagataggtgtttagaataatactcttctgttagggtcaccctgatcagaccgttcccttcccctcccacaggacttacaatacggtcccttgtgctctctgcacagctaccccagggcaaaaaacaaaccccccttcactgatccctccagtaactgtgcagacagttacaggatgcggttaacatgtctgttcacctcgcataacaaagctggcaaaaaacatctccaggatgcagacaagacacctgcaccctcgactaagctcccccaccccaacccagttctcctgcacccccaactcagctcccgcaccccgacctagttctggccctataaaaacctgctatagtctgtaagcagggctgcctcctctaactgtggtggagcagccaagcagctcaataaagcttgcttgcctga

SEQ ID NO: 80 - protein, 629 aa, Homo sapiens
MTLLTFRDVAIEFSLEEWKCLDLAQQNLYRDVMLENYRNLFSVGLTVCKPGLITCLEQRKEPWNVKRQEAADGHPEMGFHHATQACLELLGSSDLPASASQSAGITGVNHRAQPGLNVSVDKFTALCSPGVLQTVKWFLEFRCIFSLAMSSHFTQDLLPEQGIQDAFPKRILRGYGNCGLDNLYLRKDWESLDECKLQKDYNGLNQCSSTTHSKIFQYNKYVKIFDNFSNLHRRNISNTGEKPFKCQECGKSFQMLSFLTEHQKIHTGKKFQKCGECGKTFIQCSHFTEPENIDTGEKPYKCQECNNVIKTCSVLTKNRIYAGGEHYRCEEFGKVFNQCSHLTEHEHGTEEKPCKYEECSSVFISCSSLSNQQMILAGEKLSKCETWYKGFNHSPNPSKHQRNEIGGKPFKCEECDSIFKWFSDLTKHKRIHTGEKPYKCDECGKAYTQSSHLSEHRRIHTGEKPYQCEECGKVFRTCSSLSNHKRTHSEEKPYTCEECGNIFKQLSDLTKHKKTHTGEKPYKCDECGKNFTQSSNLIVHKRIHTGEKPYKCEECGRVFMWFSDITKHKKTHTGEKPYKCDECGKNFTQSSNLIVHKRIHTGEKPYKCEKCGKAFTQFSHLTVHESIHT

SEQ ID NO: 81 - DNA, 3008 bp, Homo sapiens
gttctcctcaactggcggcggcgcgaacgaatagtcgccggcgacctgtgagggcactcggaagggcgaggggagggctcgaccgctcgcgcctagtttttctatctctcccggagcctgagtctctgagccgtccccagcaaacgctcaggggctgcagaggccccgagagcttggctctctggcagatttcctctagtaagaggtggctctggaggccccgcgaaacgagtgtggtgtgtggttgcaaggcatgatggctgcaaaagtggttcctatgcccccaaagccaaagcagtcctttatactgagagttccgccagactccaagctgggccaagacctacttcgagatgccactaacgggcccaagaccatccaccagctagtgctggagcacttcctcaccttcttgcccaagccaagcctggtccagcccagtcagaaagtcaaggagaccttggttattatgaaagatgtgagctcaagccttcagaacagagtgcatcctcgtcccttggtgaagcttctgcccaaaggagtccaaaaggaacaagagacagtgtctctgtatttgaaagctaaccctgaggagctggtggtctttgaggatttgaatgtatttcactgccaggaagaatgtgtgagcttggatcctactcaacaactcacgtcagagaaggaagatgacagcagtgtcggggaaatgatgttactggcagtcaatggcagtaatcctgaaggtgaagatcctgagagggaacctgtagaaaatgaagattatagagaaaagtcttcagatgatgatgaaatggattcttccttggtctctcagcagcctcccgataaccaggaaaaggaacgactaaatacatccattccacaaaaaaggaaaatgagaaatctgttagttaccattgagaatgatactcctctagaggaactctcaaaatatgtagacatcagtattattgcccttactcgaaatcggaggacaaggagatggtacacttgtccactgtgtgggaaacagtttaatgaaagttcttacctcatttcccaccagaggacccacactggagaaaaaccctatgactgtaatcactgtgggaaaagcttcaatcataaaacaaacctcaataaacatgagcgaattcatacaggagagaaaccttattcctgttctcagtgtggaaaaaacttccgtcagaattctcatcggagtcgtcatgaaggaatccatataagggagaagatatttaagtgtccagaatgtgggaaaaccttcccaaagaatgaggagtttgtgcttcatctgcagagtcatgaggctgagagaccatatggttgcaaaaaatgtgggagaagatttggtcggctgtcaaactgtacccggcatgagaaaacccactcagcctgtaagacccgaaagcagaagtaatactgggaaccctttctgggtctgatggtgctgcctcaacctgagagctttcataagtagttctgaattcccaagctgcctaaaaaggtataaatgtgtaaaaatctcattattgccaaaattggataaatgcccatcttagctaaaacctcaaattgctagaaaattcacagggaagaaaacatttcaagggctatacctcagcatctaggctttttggactaaggagctttcctttttgaagttatatgataatgtacaggtcacagatcccctttcccaacactttgaagatgaatctggagtctgcttacttggaaggcaaagagtgacttgtgtctattgaaagtatatccgttttccccccacatggggattcatacttgagaaatagtgcaaagatgcttatctggaactgtgttctggtgaaagaaccaaattactggcttgttagccaacagcttctgatagcaattcatataaccctctaagaatacctgtttaagtcttgagtgttgaaaggaattgtttactttggaatataggaaaacagttgaatgtcagactctcatttgtatgtgatctaaatttgcaatcaatttcaataatatttacaatttgtgataaaactgacttttacagattccttttcacaacataatttaggtgtctactgttcttattgtattttgttctgctgttgatctctccagcagccgtctcatgcttctcccttgctaaaagaagtttggattactcaggcagggccatccagccccaccactagaaaagctcttcagaatcttgtccctctgttgagcccagatctcatgtgctacgaaggaaaccccaagacccagagaggaagggtcaacctggaggcaggaaaaagttggcttggatccatgtctcatcaataaccttaccatatgcttaggtcccctctatgctgtcatcagacctttggcaatggggtggtcactacctcacaaggcaaagtgttgtatgattagaaattacgtctccagtggttagctcacattgcctctcaagagacaggtttccaggtgtcttcattgtagtgggtattaattgtcttcagcctcttgatatccataccttcctgtcctctgcctagaagcaaggccagcggtgcctttacggactgatcgtgtggtgcgatttagggattcttcagttttgcttgctttaggtttccaaaagttatacattggtgttttgattggaataaagaaatcctataagctatttgggaaaaattatagtgtatgtttcccatccagaaacatgcctttctatttattagagtattatattcctgtgaaaatttttctaattttcttcacttgttttacacaattttgttattgtagttttttccattatatttttatagttgattattgcttttacatgggaaagttatttttaattatatatttgtatagtcatctcactgttgttaattttcaatagtttgttggtttagttctgttaacttttggtaaaatgacaccatctacaaagaatagtttttgtttcttgc

SEQ ID NO: 82 - protein, 395 aa, Homo sapiens
MMAAKVVPMPPKPKQSFILRVPPDSKLGQDLLRDATNGPKTIHQLVLEHFLTFLPKPSLVQPSQKVKETLVIMKDVSSSLQNRVHPRPLVKLLPKGVQKEQETVSLYLKANPEELVVFEDLNVFHCQEECVSLDPTQQLTSEKEDDSSVGEMMLLAVNGSNPEGEDPEREPVENEDYREKSSDDDEMDSSLVSQQPPDNQEKERLNTSIPQKRKMRNLLVTIENDTPLEELSKYVDISIIALTRNRRTRRWYTCPLCGKQFNESSYLISHQRTHTGEKPYDCNHCGKSFNHKTNLNKHERIHTGEKPYSCSQCGKNFRQNSHRSRHEGIHIREKIFKCPECGKTFPKNEEFVLHLQSHEAERPYGCKKCGRRFGRLSNCTRHEKTHSACKTRKQK

SEQ ID NO: 83 - DNA, 4435 bp, Homo sapiens
gtgttccgacccgctaggccccgcgcggctcggatccggcggcgctgtttcggtcgggagtgggtgggagagaagccggggcaggggaggagccgccggagctgtcggagccgtgacacccagggcagctacactcagaagccacaaggaatgctagtggagcccctcatccctcccagcttctcttccaagctgccccgtggggcttgatccaggaagctacttcagaaagtagacaatcattccaagggtacaacaaggtttaccacaatgtgagggactcagccattgcaaattgtacagatgagggcccttggaagaaaatcctcgctgtgtccaggctgaggcggggggctaatgacagtgtgagctctagatggtgtgagaccaccccaaagccaagaaatggctacagccgtggaaccagaggaccaggatctttgggaagaagagggaattctgatggtgaaactggaagatgatttcacctgtcggccagagtctgtcttacagagggatgacccggtgctggaaacctcccaccagaacttccgacgcttccgctaccaggaggcagcaagccctagagaagctctcatcagactccgagaactttgtcaccagtggctgagaccagagaggcggacaaaggagcagatcctagagctgcttgtgctggaacaatttcttaccgtcctacctggagaactacagagctgggtgcggggccaacggccagaaagtggcgaggaggcagtgacgctggtggagggtttgcagaaacaacccaggagaccaaggcggtgggtgactgtccatgttcacggccaggaagtcctgtcagaggagacggtgcatttaggagtggagcctgagtcacctaatgagctgcaggatcctgtgcaaagctcgacccccgagcagtctcctgaggaaaccacacagagcccagatctgggggcaccggcagagcagcgtccacaccaggaagaggagctccagaccctgcaggagagcgaggtcccagtgcccgaggacccagaccttcctgcagagaggagctctggagactcagagatggttgctcttcttactgctctgtcacagggactggtaacgttcaaggatgtggccgtatgcttttcccaggaccagtggagtgatctggacccaacacagaaagagttctatggagaatatgtcttggaagaagactgtggaattgttgtctctctgtcatttccaatccccagacctgatgagatctcccaggttagagaggaagagccttgggtcccagatatccaagagcctcaggagactcaagagccagaaatcctgagttttacctacacaggagataggagtaaagatgaggaagagtgtctggagcaggaagatctgagtttggaggatatacacaggcctgttttgggagaaccagaaattcaccagactccagattgggaaatagtctttgaggacaatccaggtagacttaatgaaagaagatttggtactaatatttctcaagtgaatagttttgtgaaccttcgggaaactacacccgtccaccccctgttagggaggcatcatgactgttctgtgtgtggaaagagcttcacttgtaactcccaccttgttagacacctgaggactcacacaggagagaaaccctataaatgtatggaatgtggaaaaagttacacacgaagctcacatcttgccaggcaccaaaaggttcacaagatgaacgcgccttacaaatatcccctaaaccggaagaatttggaagagacctcccctgtgacacaggctgagagaactccatcagtggagaaaccctatagatgtgatgattgcggaaagcacttccgctggacttcagaccttgtcagacatcagaggacacatactggagaaaaacccttcttttgtactatttgtggcaaaagcttcagccagaaatctgtgttaacaacacaccaaagaatccacctgggaggcaaaccctacttgtgtggagagtgtggtgaggacttcagtgaacacaggcggtacctggcgcaccggaagacgcacgctgctgaggaactctacctctgcagcgagtgcgggcgctgcttcacccacagcgcagcgttcgccaagcacttgagaggacacgcctcagtgaggccctgccgatgcaacgaatgtgggaagagcttcagtcgcagggaccacctcgtcaggcatcagagaacacacactggggagaaaccattcacgtgccctacctgtggaaaaagcttcagcagaggatatcacttaattaggcatcagaggacccactcagaaaagacctcctagctaggtccccatgtgaggagatctgctttcagccctcacctaagggaggtgaggaagaggaaaagccctcttgtcagcctgggaagaccttttcgagggagtctccctgacctgctcagatctgacattacctcttcctgcaactaaacacgagcctgggcagaacctctcagccttcctctacgccttgaggggatgtttcatccaaagtacaacctgaattgaggcttctccttcactggagtgcacctgcctctacctcatgggtataaagtaggagaactaagagacttaagaggtcgtggttcctatatcgtccaaaaaataggctgttacatatcctaaagactgctcaacagcttcaagttgaaagtggccaaggacagccccttaggtttgggaagggacgagcctgaaggattctgtctttactggggtcaaatcttaaagcacacagctctggactcaagacaggaggtttgcgtcctgatggctttgccacacattcacaggataactgcatagatccctcgctgtctgattcacttcttaccatgcactttcctttgatgctgaggagaaatggaagtgggcgaaaaatctcaaggctgcttcatgtggaccttgtcaagctgctccctcccccagcgtcaaattgttatcaggtgccaaacactgctagaaaggagggcctagtcagaagcctctttccatacgagttttggttttgtttttaatatttttttctattaaaatactcatgcatttaaccttcccgttattcaaccagtctcttggttgcatccctagcacttctactacaagtgagatggtagtgtttgagtgcttattgagtaaagcataattcggtcataatgaaatcgttcacattccctcatatgcacaagcccaccaaccccttcacaccccccttcacaggggtcgtatgagtaaggggatttggaaactgtcaacttacaaaggcactataacaattacagaatcatgattgccatgggccactttatttacatgaagacaactggagaacgactaagaccaaattatggaaaataagaaaaagctgttgctggcaagaccatcaagactgttctgacaccctgtccccatcatccctgactgagtactctgacatcacggaaagtgttgaacctgggaccctgaggaattcaccaggagtaaatggctttcatgtatttgtgttgtttgctttttcttacgtgattttatgttcatagagctagaaagtagcatctcatgatggcccaacaatctctgttgccagttaaaggttccttggagatgaggctgaataattatgaacctcaccttctctgattgtgggagtggcaagaactggggagacgtcctccataagtggagcacagggtatggggttaaagcatgacagggagagtcttctgtgcctggtttcttctcctctatctcataatgcattatgggcccgaggaataggggagggttaataagactccaaccctaatggcccaacagggaaattctcattttggtcgatgatattctgatggactggtttggtcttaataccagtcaaccgttgtccttctggaaatatacatatatgaaataaataaaggtaacacttgcagccaagttccctggtttctgggacttcccatcttacccattccttttccagggcttcagtgtcctgatacttctgagggtggttcatactcaaatagatctgggagtacagagtatttttccttgaggaaaggaagggttgggatgattagcagagtccggtgaaacatatgcactctgagataagatccaagcctggagtttgcagaagatactgtcctaataagcaggcatttctaaaccaagtatctaagcctaagcacagcttgtcctgggtgaaatgtctgccacaaaagatagtttctcctagctcagacttaaccatttataaaggttggtaaaatactggcagtgacaacaaattgactttttaattttcttatttgcattattccaataaatgaaaatctgtcagagttctacatgagggaaa

SEQ ID NO: 84 - protein, 648 aa, Homo sapiens
MATAVEPEDQDLWEEEGILMVKLEDDFTCRPESVLQRDDPVLETSHQNFRRFRYQEAASPREALIRLRELCHQWLRPERRTKEQILELLVLEQFLTVLPGELQSWVRGQRPESGEEAVTLVEGLQKQPRRPRRWVTVHVHGQEVLSEETVHLGVEPESPNELQDPVQSSTPEQSPEETTQSPDLGAPAEQRPHQEEELQTLQESEVPVPEDPDLPAERSSGDSEMVALLTALSQGLVTFKDVAVCFSQDQWSDLDPTQKEFYGEYVLEEDCGIVVSLSFPIPRPDEISQVREEEPWVPDIQEPQETQEPEILSFTYTGDRSKDEEECLEQEDLSLEDIHRPVLGEPEIHQTPDWEIVFEDNPGRLNERRFGTNISQVNSFVNLRETTPVHPLLGRHHDCSVCGKSFTCNSHLVRHLRTHTGEKPYKCMECGKSYTRSSHLARHQKVHKMNAPYKYPLNRKNLEETSPVTQAERTPSVEKPYRCDDCGKHFRWTSDLVRHQRTHTGEKPFFCTICGKSFSQKSVLTTHQRIHLGGKPYLCGECGEDFSEHRRYLAHRKTHAAEELYLCSECGRCFTHSAAFAKHLRGHASVRPCRCNECGKSFSRRDHLVRHQRTHTGEKPFTCPTCGKSFSRGYHLIRHQRTHSEKTS

SEQ ID NO: 85 - DNA, 1968 bp, Homo sapiens
acccaactcccccgcccgccccgtgcaggctgtggagactcccttcccgggggagggggcccccactgccgcaggtgccccctctgcctccaccccgctctgaaatagaaaatgtctgcagacggcggaggcatccaggacacccaggacaaggagacacccccggaggttccagatcgtggacatcctcatcaggaaatgccttctaagctgggggaggcggtaccttcaggggacactcaggagtcactgcacattaagatggagcccgaagagccacactccgagggggcatcgcaggaggatggggctcaaggtgcctggggctgggcacccctaagtcacggctctaaggagaaagctctcttcctgcctggcggagccctcccctccccccggatccccgtgctttcccgagaggggaggaccagagaccggcagatggctgcagcgctcctcactgcctggtcccagatgccagtgactttcgaggatgtggccttgtacctctcccgggaggagtggggacggctggaccacacgcagcagaacttctacagggatgtcctgcagaagaaaaatgggctgtcactgggctttcccttcagcaggcctttctgggcccctcaagcgcacggcaagggtgaggcctcgggctccagccggcaggcaggagatgagaaggagtggagaggcgcgtgcacaggagccgtcgaggtggggcagagggtgcagacctcatccgtggcagcccttgggaatgtgaagcccttcagaaccagggcagggagagtccagtggggcgtcccgcagtgcgcgcaggaagcagcctgcggccggagctcagggccggccaaagactccgggcagccggctgagccagatcgcaccccggatgcagctccgccagaccccagtcccacggagccccaggagtaccgcgtcccggagaagcccaacgaggaggagaagggcgccccggagagtggcgaggagggcctggcccctgacagtgaggtgggcaggaagagctaccggtgcgagcagtgcggcaagggcttcagctggcactcgcacctggtgacgcaccggcgcacgcacacgggcgagaagccctacgcctgcactgactgcgggaagcgcttcggccgcagctcgcacctcatccagcaccagatcatccacacgggcgagaagccctacacctgccccgcctgccggaagagcttcagccaccactccacgctgattcagcaccagcgcatccacaccggagagaagccctacgtgtgcgaccgctgcgccaagcgcttcacccgccgctcggacttggtcacccaccagggcacccacacgggcgccaagccgcacaagtgccccatctgcgccaagtgcttcacgcagagctcggcgctagtcacccaccagcgcacccacactggggtcaagccctatccgtgccccgagtgcggcaagtgcttcagccagcgttccaacctcatcgcgcacaaccgcacacacacaggcgagaagccctaccactgcctcgactgcggcaagagcttcagccacagctcgcacctcaccgcgcaccagcgcacccaccgtggcgtgcggccctacgcctgcccgttgtgcggcaagagcttcagccggcgctccaacctgcaccggcacgagaagatccacaccaccgggcccaaggccctggccatgctgatgctgggggcggcggcggcgggggctctggccacacccccacccgctcccacctaggaggccaggaaagggggagcggggcgcccagggccactggaacagccccactggagtcaaggctccgagggaggagagaggggctcgggaagggagctggggcggtgagggcatggggtgaggcatggcgatgggggagggcgagggcgagaaagggcaggcactctgcgaattaaaggccttggacttgaa

SEQ ID NO: 86 - protein, 554 aa, Homo sapiens
MSADGGGIQDTQDKETPPEVPDRGHPHQEMPSKLGEAVPSGDTQESLHIKMEPEEPHSEGASQEDGAQGAWGWAPLSHGSKEKALFLPGGALPSPRIPVLSREGRTRDRQMAAALLTAWSQMPVTFEDVALYLSREEWGRLDHTQQNFYRDVLQKKNGLSLGFPFSRPFWAPQAHGKGEASGSSRQAGDEKEWRGACTGAVEVGQRVQTSSVAALGNVKPFRTRAGRVQWGVPQCAQEAACGRSSGPAKDSGQPAEPDRTPDAAPPDPSPTEPQEYRVPEKPNEEEKGAPESGEEGLAPDSEVGRKSYRCEQCGKGFSWHSHLVTHRRTHTGEKPYACTDCGKRFGRSSHLIQHQIIHTGEKPYTCPACRKSFSHHSTLIQHQRIHTGEKPYVCDRCAKRFTRRSDLVTHQGTHTGAKPHKCPICAKCFTQSSALVTHQRTHTGVKPYPCPECGKCFSQRSNLIAHNRTHTGEKPYHCLDCGKSFSHSSHLTAHQRTHRGVRPYACPLCGKSFSRRSNLHRHEKIHTTGPKALAMLMLGAAAAGALATPPPAPT

SEQ ID NO: 87 - DNA, 2807 bp, Homo sapiens
agaatgcacctggcatcaacacggcggcggcggcggcggcttccaacaggctctggggcgccgagcggacaggaacgcagcacgggggctccgaggcggggtctgggtgttgaggggcgactggagccatggcggagtcggcgcctgctcggcacaggagaaaacgacgctccacacctttaacttcttccacacttccttcacaagcaacagagaaaagctcctattttcagaccaccgagatttcactctggacggtggtggccgctattcaggctgtggagaagaagatggagtcccaggctgcccggctacagagcctggaggggcgcacggggacagccgagaagaagctggctgactgcgagaagatggccgtggagttcgggaaccagctggagggcaagtgggccgtgctggggaccctgctgcaggagtatgggctactgcagaggcggctggagaacgtggagaacctgctgcgcaacaggaacttctggatcctgcggctgcccccgggcagcaagggggaggcccccaaggtgtccaggtcactggagaatgatggcgtctgtttcaccgagcaggaatgggagaatctggaggattggcagaaggagctctacagaaacgtgatggagagtaactatgagacactggtctctctgaaggtccttggccagacagagggagaagcggagttgggtacagagatgctgggtgacttggaagaggaaggtcctggtggtgcccacccagcaggtggggtcatgatcaaacaggagctacagtatacacaggaaggccctgcggatcttcctggagagttctcatgcattgctgaagagcaggctttcctgagcccagagcagaccgaactctggggtggtcagggcagttctgtcctcttggaaacaggtcctggggactctactctagaggagcctgttggtagtagagttcctagcagcagcagaactgtgggctgcccgaagcagaaatctcataggcaggtacagctggaccaggaatgtgggcagggcctgaagctgaaaaaggacacttcccgcccctacgaatgttctgagtgtgagatcaccttccgctataagcagcagctggccacacatctgcgcagccactctgggtgggggtcttgtacacctgaggagccagaggagagccttaggcccaggccacggctgaaaccacagaccaaaaaggccaagctgcatcagtgtgatgtgtgcctgaggagcttcagctgcaaggtgagcctggtgacccatcagcgttgccacctgcaggaggggcccagtgccggccagcatgtccaagagaggttctcacccaacagcctggttgccctgcctggccacatcccttggaggaaaagccggagttccctcatctgtggttactgtggcaagagcttcagtcacccatctgacttggtgcggcaccagcgcatccacacgggtgagcggccctacagctgcactgagtgtgagaagagctttgtccagaagcagcacctcctgcagcaccagaagatccaccagcgggagcggggtgggctggccctggagcccggaaggcccaatggcctgctttaagggtgcagcccctcgcccgtctgggggatggaggggggtggcattggttcccccgaagagacactgcagtcagggactgagttcttcctgagggcagttgtttgtgattgccttcccttgtcccagtaccaagccaagcccaaaggctgtcctgaaaaccctgtggaagaagagtccaggccaggtcttcatcctgctgccaagtttgctgtttcttggcaccttcaggtctctggttttctcattcatgccaatgcttgtgggctggggttggcgttctgaccccacagggactggtggctggttccagggctcgtcccggcatttcatgtcttcccacggggttgagtcgggccataggggtgagcagctgcctggaagagttctgggaagtataaccctccattttttcttgttttataatctctttgtttaataataagtagaagaaataatttaaatgaactgcttagccctgctctgaagaaccttttttggaattagattttagttgattttttaaagaatacagcccaacacttgttttttacattttaagagttgtagaagttgttcctaacttggggactggacctaccctctaggagggagttgttaatggggctcttttagcccactgatgcttacttaggccggagagcaggggacacggtgctaggttccctcgtgcagtgcctggtgctctcaaattgtctcaaaaggaccaagaggaaaagagtcggaggggtagaccctgcagccctgttgagaagaaagattccagtgaagttgctgatggtatggctgtggtctgggacttgcggtgtctcggcatacccctctcctcttcccacctcctcctggctatgttctgcagcctcccagagtagaaaactactttgttacttaaggttgttcaccttgtaccagtggttatttgagtttgttcctattacaccaatccttacttgaggtggttcggattacagtttccaaatgcattctgggattgcctattccagagagggtacagaaaaagcacacagatggcttgtctcaggagtgttgaatgtgtgccccgctgctgtctggggggatgggagtgggctctggggtcatatgtgaacatccccttggatgatttgcggttgcttagaataaaacttgctactagcaaaagaaaaaaaaaaa

SEQ ID NO: 88 - protein, 495 aa, Homo sapiens
MAESAPARHRRKRRSTPLTSSTLPSQATEKSSYFQTTEISLWTVVAAIQAVEKKMESQAARLQSLEGRTGTAEKKLADCEKMAVEFGNQLEGKWAVLGTLLQEYGLLQRRLENVENLLRNRNFWILRLPPGSKGEAPKVSRSLENDGVCFTEQEWENLEDWQKELYRNVMESNYETLVSLKVLGQTEGEAELGTEMLGDLEEEGPGGAHPAGGVMIKQELQYTQEGPADLPGEFSCIAEEQAFLSPEQTELWGGQGSSVLLETGPGDSTLEEPVGSRVPSSSRTVGCPKQKSHRQVQLDQECGQGLKLKKDTSRPYECSECEITFRYKQQLATHLRSHSGWGSCTPEEPEESLRPRPRLKPQTKKAKLHQCDVCLRSFSCKVSLVTHQRCHLQEGPSAGQHVQERFSPNSLVALPGHIPWRKSRSSLICGYCGKSFSHPSDLVRHQRIHTGERPYSCTECEKSFVQKQHLLQHQKIHQRERGGLALEPGRPNGLL

SEQ ID NO: 89 - DNA, 1614 bp, Homo sapiens
ccacatcttgcgagtccttccgaacgagtctcctttccttggggctcgcaaccacccaatgatcgattcaggagaaaagaagcctgggcggagagcagaggaggcagtgaccttcaaggatgtggctgtgatcttcactgaggaggagctggggctgctggaccctgcccagaggaagctgtaccgagatgtgatgcttgagaacttcaggaacctgctctcagtggggcatcaaccattccatggagatactttccacttcctaagggaagaaaagttttgggtgatggggacaacaagccaaagagaagggaatttgggaggcaagatccaaactgagatggagactgttccagaagcaggaacacatgaagaattttcctgcaagcaaatttgggaacaaattgcaagtgacttaaccaggtctcaagataccaccataagtaactctcagttatttgaacaagatgacaacccctcccagattaaagcaagactatctacagttcacacaagagaaaaacctttccagggtgaaaattgtaaacagttcttcagtgatgtttccttctttgatcttcctcagcagttatattcaggagagaagtctcatacctgtgatgagtgtggaaaaagcttctgttacatctcagcccttcatattcatcagagggtccacatgggagtgaaatgctataagtgtgatgtgtgtggtaaggaatttagtcagagctcacgtctgcaaactcatcaaagagtccacactggagagaaaccattcaaatgtgagcagtgtgggaaaggcttcagatgtagatcagcacttaaagttcattgcaaattacacatgagagagaaaccttataattgtgagaaatgtgggaaggctttcatgcacaatttccagcttcagaaacatcacagaattcatactggggagaagccattcaaatgtgaaatatgtggtaagagcttctgtcttaggtcaagtcttaataggcattgcatggtccacacagcagagaaactgtacaaatctgaaaagtatggaagaggtttcattgataggctagatttgcataagcatcagatgattcatatgggacagaaaccatataattgtaaagaatgtgggaagagcttcaaatggtcctcatatcttttggtccatcaacgagtccacactggagaaaagccatacaaatgtgaggagtgtgggaagggctacattagtaagtcaggtcttgacttccaccatagaacccacacgggagagagatcttataactgtgataactgcgggaagagctttagacatgcttctagtattttgaatcataagaaactccactgccaaagaaagccattgaaatgtgaagactgtggaaagaggcttgtatgccggtcatactgtaaagaccaacaaagagaccacagtggagaaaacccatccaaatgtgaggactgtgggaagcgctacaagaggcgcttgaatctggatataattttatcattatttttaaatgacatataagttatacatatttatggagtgtgaaatttgatacatgtatataatgtgtgctgattaaatcagtttaatttcacctgaaa

SEQ ID NO: 90 - protein, 491 aa, Homo sapiens
MIDSGEKKPGRRAEEAVTFKDVAVIFTEEELGLLDPAQRKLYRDVMLENFRNLLSVGHQPFHGDTFHFLREEKFWVMGTTSQREGNLGGKIQTEMETVPEAGTHEEFSCKQIWEQIASDLTRSQDTTISNSQLFEQDDNPSQIKARLSTVHTREKPFQGENCKQFFSDVSFFDLPQQLYSGEKSHTCDECGKSFCYISALHIHQRVHMGVKCYKCDVCGKEFSQSSRLQTHQRVHTGEKPFKCEQCGKGFRCRSALKVHCKLHMREKPYNCEKCGKAFMHNFQLQKHHRIHTGEKPFKCEICGKSFCLRSSLNRHCMVHTAEKLYKSEKYGRGFIDRLDLHKHQMIHMGQKPYNCKECGKSFKWSSYLLVHQRVHTGEKPYKCEECGKGYISKSGLDFHHRTHTGERSYNCDNCGKSFRHASSILNHKKLHCQRKPLKCEDCGKRLVCRSYCKDQQRDHSGENPSKCEDCGKRYKRRLNLDIILSLFLNDI

SEQ ID NO: 91 - DNA, 2563 bp, Homo sapiens
agacgacgtagcagccatcttttccctggctttggtgattcagccctgacttctcaaaaagcactgcacagaggaggaggcagcagaaccccatttcagcttcttaggactctgcacttccccagaaggaagaattaaaaatgaatatgttcaaggaagcagtgaccttcaaggacgtggctgtggccttcacggaggaggaattggggctgctgggccctgcccagaggaagctgtaccgagatgtgatggtggagaactttaggaacctgctgtcagtggggcatccacccttcaaacaagatgtatcacctatagaaagaaatgagcagctttggataatgacgacagcaacccgaagacagggaaatttaggagagaaaaatcaaagtaagttaattactgttcaagacagagaatcagaagaagagctttcttgttggcaaatctggcaacaaattgcaaatgacttaaccaggtgtcaagactccatgatcaataattctcagtgtcacaaacaaggtgatttcccttaccaggtagggacagaactgtctattcaaatttctgaagatgagaactatatagtaaataaagcagatggtcccaataatactgggaatccagagtttcctatcttgagaacccaggattcttggaggaaaacattcctgactgagtcacagagattgaacagagatcagcaaatttccataaaaaataaattatgtcaatgtaagaagggtgttgatcccatcggttggatttcacatcatgatggtcatagagtacacaaaagtgaaaaatcttatagacccaatgattatgaaaaagacaacatgaagattttgacatttgatcacaatagcatgattcacacaggacagaaatcgtaccagtgtaatgagtgtaaaaaacccttcagtgatctctccagctttgatcttcatcagcagttacaatcaggagagaagtctcttacatgtgttgagcgtggaaaaggcttctgttacagcccagttcttcctgttcatcagaaagtacatgtgggagaaaaacttaagtgtgatgagtgtggtaaggaattcagtcagggcgctcatctacagacccatcagaaagtccacgtgatagagaaaccatacaaatgtaagcaatgtgggaaaggtttcagtcgtagatcagcacttaatgttcattgcaaggtccacacggcagagaaaccttataattgtgaggagtgtgggagggccttcagtcaggcctctcatcttcaggaccatcagagactccacactggggagaagccattcaaatgtgatgcatgtggtaagagcttcagtcggaattcacatcttcaatcccatcaaagagttcatacaggagagaaaccatacaaatgtgaggagtgtggtaagggcttcatttgtagctcaaatctttacattcatcagagagtccacacaggagaaaaaccctataaatgtgaggaatgtggtaaaggctttagtcggccttcaagtcttcaggcccatcagggagttcacactggagagaagtcatacatatgtactgtatgtgggaaaggctttactctgagttcaaatcttcaagcccatcagagagtccacactggagagaagccatacaaatgcaatgagtgtgggaagagcttcaggaggaattcccattatcaagttcatctagtggtccacacaggagagaaaccctataaatgtgagatatgtgggaagggcttcagtcaaagttcgtatcttcaaatccatcagaaggcccacagtatagagaaaccttttaagtgtgaggagtgtgggcagggtttcaatcagagctcacgacttcagattcaccagctgatccatacgggtgagaaaccatacaaatgtgaagagtgtggcaagggatttagtcgtagagcagatcttaaaattcactgtaggatccacacaggagagaaaccatataattgtgaggagtgtgggaaggtcttcaggcaggcctcaaatcttttggcccatcagagagtccacagtggagaaaaaccattcaaatgtgaagaatgtgggaagagtttcggtcggagtgcacatcttcaagcccatcaaaaagtccacactggagataagccatacaaatgtgatgagtgtgggaagggcttcaagtggagcttgaaccttgacatgcatcagagggtgcacacaggagaaaaaccatataaatgtggggagtgtggtaagtacttcagtcaggcctcaagtcttcaacttcatcagagtgtccacacaggagagaaaccatacaaatgtgatgtgtgtggtaaagtcttcagtcggtcttcacaactacagtctcatcagcgagttcacactggggagaaaccttataaatgtgagatatgtggtaagagcttcagttggcgatcaaatcttacagttcatcacagaatccatgttggtgataaatcctataaaagtaataggggtggtaagaacatcagagaatccacacaggaaaaaaaatctataaaatgattctttgtgaa

SEQ ID NO: 92 - protein, 803 aa, Homo sapiens
MNMFKEAVTFKDVAVAFTEEELGLLGPAQRKLYRDVMVENFRNLLSVGHPPFKQDVSPIERNEQLWIMTTATRRQGNLGEKNQSKLITVQDRESEEELSCWQIWQQIANDLTRCQDSMINNSQCHKQGDFPYQVGTELSIQISEDENYIVNKADGPNNTGNPEFPILRTQDSWRKTFLTESQRLNRDQQISIKNKLCQCKKGVDPIGWISHHDGHRVHKSEKSYRPNDYEKDNMKILTFDHNSMIHTGQKSYQCNECKKPFSDLSSFDLHQQLQSGEKSLTCVERGKGFCYSPVLPVHQKVHVGEKLKCDECGKEFSQGAHLQTHQKVHVIEKPYKCKQCGKGFSRRSALNVHCKVHTAEKPYNCEECGRAFSQASHLQDHQRLHTGEKPFKCDACGKSFSRNSHLQSHQRVHTGEKPYKCEECGKGFICSSNLYIHQRVHTGEKPYKCEECGKGFSRPSSLQAHQGVHTGEKSYICTVCGKGFTLSSNLQAHQRVHTGEKPYKCNECGKSFRRNSHYQVHLVVHTGEKPYKCEICGKGFSQSSYLQIHQKAHSIEKPFKCEECGQGFNQSSRLQIHQLIHTGEKPYKCEECGKGFSRRADLKIHCRIHTGEKPYNCEECGKVFRQASNLLAHQRVHSGEKPFKCEECGKSFGRSAHLQAHQKVHTGDKPYKCDECGKGFKWSLNLDMHQRVHTGEKPYKCGECGKYFSQASSLQLHQSVHTGEKPYKCDVCGKVFSRSSQLQSHQRVHTGEKPYKCEICGKSFSWRSNLTVHHRIHVGDKSYKSNRGGKNIRESTQEKKSIK

SEQ ID NO: 93 - DNA, 2069 bp, Homo sapiens
gtatttcggggccctaggcgcgcgagcggtcagcatccggaatctggcccctgcaggcgtggggttccacgtgggaggaatccatcccctctgggagtaagaaatgaccagggtccgggaaccagttacattcaaggatgcctctgtggccttcaccgaggaggagtgaggtcacctggactctgctcccaggaagctgtgcggagctgtgatgctgggcaactacagaaacttggtcttggagacttgaatgaaaattctgtggagaatcttcagcagaaaacacttcaggatctgttacatgagctttcctcctggctagttttggaaggcatggccagtacaattactggaagtcaggattgtattgtgaatcatcgaggggaagtggatggggagcctgaactagatatttccccttgtcaacagtggggagaagcatcttctcctatttccagaaacagggacagtgtgatgactcttcaaagtggttgtttcgaaaacattgaaagtgaaacatatttgcctttgaaagtctcaagccaaatagacacacaagactcttcagtgaagttctgtaagaatgagcctcaggatcatcaggaaagcagacgtctctttgtaatggaagaaagcactgagagaaaagtgataaagggggaaagttgttcagagaaccttcaagttaaactggtgtctgatggacaagaactggcctcgccattgttaaatggtgaggcaacttgccagaatggccagttaaaagaatctttggatcccattgactgtaactgcaaagacattcatggatggaaatcacaggtggtcagttgtagtcagcagagagctcatacagaggagaaaccctgtgaccataataactgtgggaaaatacttaacaccagcccagatggtcatccatatgagaaaatccacactgcagagaaacaatacgaatgtagtcagtgtggtaagaacttcagtcaaagctcagagctactacttcatcagagagaccacacagaagaaaaaccctacaaatgtgagcaatgtgggaagggcttcacaaggagctcgagtctgcttatccatcaggcagtccacacagatgagaagccttataagtgtgacaagtgtgggaagggcttcaccaggagctcaagtctgctcatccatcatgccgtccatacaggcgaaaaaccttataaatgtgacaagtgtgggaagggctttagtcagagctccaaactgcacatccaccagcgagtccacactggagagaagccctatgagtgtgaggagtgtggtatgagcttcagtcagcgctcaaacctgcacatccaccagcgagtacacacaggagagaggccctacaagtgtggtgagtgtgggaagggcttcagtcagagctcgaaccttcacattcaccggtgcatccacacaggagagaagccttaccaatgctatgagtgtgggaagggtttcagccagagctcggatcttcgcatccatctcagagtccacactggagagaagccctatcactgtggcaagtgtgggaagggatttagccagagttccaaactcctcatccaccagagagtacatactggagagaagccctatgagtgcagcaagtgtgggaagggcttcagccagagctccaaccttcacatccaccagcgggttcacaagaaagatcctcgctaactgacattagcccattcaggtcttcacagcgctcatactgtaaaaactgttaaatatttagtatcactcttactttatattctacaaaggagagagatgtaagggttatttagatatgttccctcactgaaaaatcactcattcaaaatatttaagtatcaagcactttgttatgctgtacaatgaatggattgttcttgtttctcagatgggtagagtaaaagtgtctgtactttacaattcaactacatgttctacccagcattttaacggcaagaactttatatttattctcaagcagggcatgtttccctttgttcacattctctgagaaattgaaactctggtttctcttcaaa

SEQ ID NO: 94 - protein, 458 aa, Homo sapiens
MASTITGSQDCIVNHRGEVDGEPELDISPCQQWGEASSPISRNRDSVMTLQSGCFENIESETYLPLKVSSQIDTQDSSVKFCKNEPQDHQESRRLFVMEESTERKVIKGESCSENLQVKLVSDGQELASPLLNGEATCQNGQLKESLDPIDCNCKDIHGWKSQVVSCSQQRAHTEEKPCDHNNCGKILNTSPDGHPYEKIHTAEKQYECSQCGKNFSQSSELLLHQRDHTEEKPYKCEQCGKGFTRSSSLLIHQAVHTDEKPYKCDKCGKGFTRSSSLLIHHAVHTGEKPYKCDKCGKGFSQSSKLHIHQRVHTGEKPYECEECGMSFSQRSNLHIHQRVHTGERPYKCGECGKGFSQSSNLHIHRCIHTGEKPYQCYECGKGFSQSSDLRIHLRVHTGEKPYHCGKCGKGFSQSSKLLIHQRVHTGEKPYECSKCGKGFSQSSNLHIHQRVHKKDPR

SEQ ID NO: 95 - DNA, 2953 bp, Homo sapiens
ctcttcatcctagcccgccccctccccggctctggacccggttctgtgggagggtccgttccgggctcggtgcgactgcgcagctcctcggcgcttcctcggtggcttccccgggtcgagcaaacaggtaagttcggggagacttcaggccagggcagtctcctgtcttctcttggaaaccacagcagcccatgcacacagaatggcagccacattccagcttccagggcaccaggagatgccgctgaccttccaggatgtggccgtgtacttctctcaggcggaggggcggcagctgggcccccagcagcgggcgctctaccgggatgtgatgctggagaactatgggaacgtggcctctctgggattccctgtccctaagccggagttgatctcccagctggagcaggggaaggaactttgggtcctgaatcttctgggagctgaggaaccagatatcttgaaaagctgccagaaagattctgaggttgggaccaagaaggaactatctattttaaaccaaaaattttccgaagaagtaaaaaccccagaatttgtatcaagaagactcttaagggataatgcacaggccgctgagtttcgggaagcatggggccgtgagggcaaactcaaagagcgcgtgggaaattctgccgggcagagtttgaacaaacccaatattcacaagagagttttaacagaagctaccgtgggcagggaaagatctttgggagaaagaacccaagagtgtagtgcatttgatagaaacttgaatctggaccaaaatgttgttagacttcaaagaaataaaacaggagagagggtctttaaatgtgatatatgcagcaaaaccttcaaatataattcagacctaagtagacaccagagaagtcacactggggagaagccgtacgaatgtggccggtgtgggcgagcctttactcacagctcaaatcttgttctgcaccatcacattcacactggaaataaaccatttaaatgtgatgaatgtgggaaaacttttggactcaattctcacctccgtcttcatcggagaattcacactggagaaaaaccctttggctgtggtgagtgtgggaaggctttcagtcgaagctcaactcttattcaacatcggatcattcacacaggagagaaaccctacaagtgtaatgaatgtggaagaggctttagccagagcccccagttaactcagcatcagagaattcacactggagagaagccgcatgaatgcagtcactgtgggaaggccttcagtcgaagctccagccttattcagcatgagagaattcacactggagagaagccccataaatgcaatcagtgtgggaaggccttcagtcagagctcaagccttttcctccatcatcgggttcatactggagagaaaccctatgtatgtaatgaatgcggcagagcctttggttttaactctcatcttactgaacacgtaaggattcacacaggagaaaaaccctatgtttgtaatgagtgcggcaaagcctttcgtcggagttccactcttgttcagcatcgaagagttcacactggggagaagccctaccagtgcgttgaatgtgggaaagctttcagccagagctcccagctcaccctacatcagcgagttcacactggagagaagccctatgactgtggtgactgtgggaaggccttcagccggaggtcaaccctcattcagcatcagaaagttcacagcggagagactcgtaagtgcagaaaacatggtccagcctttgttcatggctccagcctcacagcagatggacagattcccactggagagaagcacggcagagcctttaaccatggtgcaaatctcattctgcgctggacagttcacactggtgagaaatcctttggatgtaatgaatatggaaaagctttcagtcccacctcacgacccactgaagatcagataatgcatgctggggaaaagccctataaatgtcaagaatgtggaaacgccttcagtggaaagtcaacccttattcaacatcaggtaactcacactggtcagaaaccatgtcattgcagtgtgtatgggaaagccttcagccagagttcacagctcacaccacctcagcagactcgtgttggagagaaacctgctttaaatgatggctctaaaagatactttattcatatcaagaagattttccaagaaagacatttttaatgtgataaatgcagaagacagtttagcaactgttcacttgacattagaagataagatggcataatgaaagatatataaggtctaaatattactggcaaagtaaaataaatagttcagatgactactaaagtcaaagtcattaaatctggaagtaaacacgagaattcattctgggaaatcaggctgtctgtgtaaaggttactgctgtgctcaggagttgaaccgtgtggtgctgtatccggatactcatgacgaatggatggagggcgtgaaaagtgagcccagctggtgctctgggtctaccctacctgacatccttccagtcttatcctttgtttcctatccaggcccaggcttgtggctgagaacatccactttcagtcccatatacctgcctccaagtgtggtacagagaacttgggcctgctgggggcgcttagccttactctctccaccacctctcccaccaacccccagatgaactgcaggtagacgtttcttccttgcttggagccccagtttttgcatttcattttcattaaaatgaaaggtggtttggttttggttctaaggagctctacagtttaacagagagagggaccttaggggccaagaaagcaggggcctaccaagtatctccacttttgaaaattgtaattactgataaaaaattttttaaaggcaggtttattgaagcataatttataaacaataaaatttactctttttagtgta

SEQ ID NO: 96 - protein, 671 aa, Homo sapiens
MAATFQLPGHQEMPLTFQDVAVYFSQAEGRQLGPQQRALYRDVMLENYGNVASLGFPVPKPELISQLEQGKELWVLNLLGAEEPDILKSCQKDSEVGTKKELSILNQKFSEEVKTPEFVSRRLLRDNAQAAEFREAWGREGKLKERVGNSAGQSLNKPNIHKRVLTEATVGRERSLGERTQECSAFDRNLNLDQNVVRLQRNKTGERVFKCDICSKTFKYNSDLSRHQRSHTGEKPYECGRCGRAFTHSSNLVLHHHIHTGNKPFKCDECGKTFGLNSHLRLHRRIHTGEKPFGCGECGKAFSRSSTLIQHRIIHTGEKPYKCNECGRGFSQSPQLTQHQRIHTGEKPHECSHCGKAFSRSSSLIQHERIHTGEKPHKCNQCGKAFSQSSSLFLHHRVHTGEKPYVCNECGRAFGFNSHLTEHVRIHTGEKPYVCNECGKAFRRSSTLVQHRRVHTGEKPYQCVECGKAFSQSSQLTLHQRVHTGEKPYDCGDCGKAFSRRSTLIQHQKVHSGETRKCRKHGPAFVHGSSLTADGQIPTGEKHGRAFNHGANLILRWTVHTGEKSFGCNEYGKAFSPTSRPTEDQIMHAGEKPYKCQECGNAFSGKSTLIQHQVTHTGQKPCHCSVYGKAFSQSSQLTPPQQTRVGEKPALNDGSKRYFIHIKKIFQERHF

SEQ ID NO: 97 - DNA, 17697 bp, Homo sapiens
actcccggccttagtcgggtgcgcgcgtgcagggctgtttccggcttagactcagtggaccggaatctggccagcgggtgtacctggctgagtctctgtggccgcggaggcgcggagctaagcggctcggattatcctgggcagaccagagacttgaccagctaaacacttccgtcggtccggggcgtggacggggccagatcagcctcctgctctcccgagtcagggccacggaaaggcacaaatccatccgtgcgactcctggtacccagaccgggaggttgtctagtcacgcgcggtctgtgttgggcgagagctgaggagccggcgtccctgccaacgactcggccccgggacggtcaggagcctggggccctggtcccgcacctgtcttcgggcggacgcatccctcacggtctctccgcagcccgcgggtcctgcccccgcaggcagcgcgcgaacgtgggcgtggggatggccaccagtttccggacagcttcgtgctggggattattgtcattcaaggatatatctatggagttcacctgggatgaatggcagctactggattctacacagaagtacctgtacagagatgtgatattggaaaactatcataacctgatatcagtggggtatcatggtaccaagcctgacttaatcttcaagttggaacaaggagaagatccatggataataaatgccaaaatttccaggcagagctgtccagatggctgggaagaatggtaccagaacaatcaagatgagcttgagagtattgaaagaagctatgcttgtagtgtgttgggaagacttaatctgagcaaaacccatgattcttcaagacagagactctataacacacgtggaaaaagtttgacacaaaactcagctccaagcagaagttatttaagaaagaatcctgataagtttcatggttatgaagaaccatattttcttaagcatcaaagagctcatagcatagaaaaaaactgtgtgtgtagtgaatgtgggaaagcttttcgttgtaagtcacagctcattgtacatctcagaattcatacaggagagagaccttatgaatgcagtaaatgtgaaagagccttcagtgccaagtcaaaccttaatgctcatcagagagttcatacaggagaaaaaccctactcatgtagtgagtgcgagaaggtcttctctttcaggtcacagctcattgtccatcaggaaattcacacaggagggaaaccctatggctgcagtgaatgtgggaaagcctacagttggaaatcacagcttcttttacaccagagaagtcacacaggagtgaaaccgtatgaatgcagcgaatgtgggaaagcctttagtttgaagtctccattcgttgtacaccagagaactcatacaggagtgaaaccccataaatgcagtgaatgtgggaaagcctttaggagtaagtcctatctccttgttcacatccgaatgcatacaggagaaaaaccctatcaatgcagtgattgtgggaaagccttcaatatgaagacacaactcattgtacatcagggagttcacacaggaaataatccttatcaatgcggtgaatgtgggaaagcctttggtaggaaggaacagctcactgcacatctgagagctcatgcaggagagaagccctatggatgcagtgaatgtgggaaggctttcagcagcaagtcataccttgttatacataggagaacacacaccggagagagaccctatgaatgtagtttgtgtgagagagccttttgtggaaaatcacagctgattatacatcagagaactcattcaactgagaagccctatgaatgcaatgaatgtgaaaaagcctaccctaggaaggcatcacttcagatacaccagaaaactcattcgggagagaaaccttttaaatgcagtgaatgtggaaaagccttcactcagaagtcatctctcagtgaacatcagagagttcacaccggagagaaaccatggaaatgctctgaatgtgggaaatccttctgttggaattcagggcttcgtatacatcggaagactcataaatgagaaatcagaatgatgcaatgtgagaaactgatgttcaggagacttcggataatatagacaggatttacaagcaggaggccctaaaattacactcatgtcaaaaatcagagaggagagagaccaaccatatttgggatgagtgtaaaagctttcagaaataagttacaaatctttgtagatgaaaataatggaaggaatgtggagcaataaatgtatcaaatgttgtagtatcatcatgaagattcagagaatttacactaggaacaccttataagttgaataaattaaggaagcattttcccattgaaagtgtgttccatggaaagtcacattccagatttgaagctgtgtttttgtaaaataaaatcttggtatgaacagttgacttcatggtggagtataaagttgtttttttaaaaatatgtaaataatgttcaggaaaaacgcagggaacagagtcttaaagttaatggatatttaatgtgactttcctgagttaacactgaatagtatttctaaaattttttgtactttattttttaatgtaacttgttctatctatctatatatatatttgatagtttgtggaataatatcccccagtattttccatattaaatgctaattatcttttgatttctttttcataagcagatctggcatttattacagggctgccgcttaagagaactcattataatgaacgtttattatattttgcagttccatgcctgttgtccattgattgacatgagcacccctgttttctctggagaaatacctcccctctctggggtgcttcctgtggtagtgtctttcaggtatccgttccactagctacaggtgagcattttacccattgttggataatggtaatctctttttcagaattttgagtctgtaattcatttgtacatgaaccagaaaatgtgggaactcattcattcttgtcccagaattctgttgagaacatccattcattctggctaattgattacaagaataactgtggatacgatccctttagaacctgcttctctgatctgtgtgtttcctcacttctcaataaaaatgtcttttgctttttgttgtttgggtttttttttttttttttttttttttttttttgagactaagtttcactcttgtcctccaggctggaatgcaatggcatgatctcagctcactgcaacttccacctcctgggttcaagcaatttccttgcctcagcctcccaagtggctaggattacatgcctggctaatatttgtatttttagtatagacggggtttcaccatgttggccaggctggtcttgaactcctgacctcaggtgatctgcccacttcagcctcccaaagtcatgggattacaggtgtgagccaccgagcccggccagctttctatttcttataacctaagggctttaactgatcagttgttgccttggtagcatgtagttaacaaagtggggtatatgatttaggtttgtttgtttttcctgagacaagaaaatcacattcttgtttatatttgaagatagcaacttttagccatcatgtgaaatatggttattgtttctgtacacctggaacgttgtagtgcctgatactgaaattttggaaacactgaagaattatagcattataagaattttaaatttatgagaaaatctgagacaggggcagagatggctgattttgatcttgctggatcttagaccatgagaatgacaggcctgaagccctgaaatctcacctcagggtggagtgtcagacttggcaactttgacattgctgaaaaagtttcttacagctgtaggagtgaggtggtgggaatcaaatagtatatttggcttggtgaattaaagtcagttcacctcaaatgtttactaaatcccttaatgtaaacatgtgttgaaaaagttatcctcacccttccccccctcaaaaagttatcccttgataatttgaataggaatatctgggaagaacctgaggactcagcctagcaagctcttgtgatagactttgaatagcagtatctgcgaagaacctgaggcctcagcctagcaaactcttctgatagactttgaataggaatgtctgggaagaacctgaggactcagcctagcaaactcttctgatagactttgaataggagtatctgggaagaacctgaggactcagcctagcaaactcttctgatagactttgaataggaatgtctgggaagaacctgaggactcagcctagcaaactcttctgatagactttgaataggagtatctgggaagaacctgaggactcagcctagcaaactcttctgatagactttgcactgcagatgcttcatttaaggctatagagtagatgttggcaatatataaaattcaaacttgagtgtccataaataactgttgttggaacatggctaaatatatttgtgtattatttgactgcttttgcacagccatggcacagttgagtagttgaggtataaaaaacctgccacctcctgatacagatagaaccccttcccttttctgggaaaatgtggaatttgccttgcaggaggaagcttattctgccagttccccatggcttatttttaccagtttggtaacaataatctacactaaacatgccctgggatgggattgctcatttaggaaaatatgtagaattcatagagcattgcaggaatgagtaatgtatcaaaacttctcagcatgacaacacccagggcaacgtgacaaaaccctgtctacaaaagtttcttaaaagctggttacagcggtgcacacctgcaatcccagctactcaggaggttgaggcaggaggatcacttgagcccaggaggtcaaggatgcagtgagctgcactgtactccagtctgggcaacagtgagaccctgtctcaaaaaaaaagttgggggagggggtagatacttgtgaaatcctttgagggtgttcagtgaagggcaattacttacagcatatacttggtgcactgacacccagcagtgatgatggttttgctttctgtttttttttttgttttgttttgtttttttttttttttgagacggagtcttgttctgtcacccaggctggagtgaattgcacaatctcggctcactgcaacctccgcctcctgggttcaagcgattctcctgcctcagcctccatagtagctgggattacaggtgtgtgccaccgcgcctggctaatttttgtatttttagtagagacggggtttcaccacgttggccaggctggtcttgaattcctgacctcaggtaatccacctgcctcggcctcccgaagtgccgggattacaggcgtgagccaccatgcctgaccatgatgatggttttaaaagttagctgtagcagctaaggcaagaccagatccaacactggcttatggcaaggggaagaacaaaagtcaggaactttgccataatctagaagaaagaatgataatgctttgtgacatgctggattgtatccattatgtgttcctaagaccctcagccctctccctccaccaagacccaataaaagtgtgttattgaaagtagtagctactggccgggcgtggtggctcacgcctgtaatcccagcactttgggaggccaaggtgggtggatcacaaggtcgggagttcgagttcagcctggccaatatggtgaaatcccgtctcaactaaaaatacaaaaattagtcgggcatggtggcgggcgcctgtaatcccagctacttgggaggctgaggcaggagaatcgctggaacccgggaggtggaggtggcagtgagcagagattgcgccattgcactccagcctgggtgacagagtgagactctgtctcaaaaaaaaaaaaaaaaagaaaagaaaatgacaaacacatgttctgtgtatatgacacaatcctaactgtggcatgtatctatgtcttcacttgcatcggcctcaattatcaacttgtggcaaaagaataagaaagagaactaaaaaatgaaaaaaaataagatgctttcctatggtcccagctacttgggaggctgaggcaggagtgtcgcttcagcccagaaggttgaggatgcagtgagccatgattgtgtttcagcctggatgacagggcaagacctcatatctgtaaaaagtaaaaataaataaacaaactatataataataatacagaagacaaatgtcaatgttgctgaaaagccaaaagaagccaagaggacagtcttctgagtagagggcataggagttcccaaagaggaaagtccagtctgagatcaggctggaggccaaaaggaactcttgacctgagacagttggaaatattacttctactggcaaataaaagtgcttcaagcagacgtttatttagaaattcatgctgcatgtttattgatggaatgtttgtgtgactctttaatagaagtctgaactaggtatgccatatatttccatatatcttcatttgtcttgggggtaagtgttgagagaaggaagtggcttttggttttgtgagtgtcttgaagatctaaggtttattgtgaaaaagtgtaggggtaatttttttttttttttttttttgagacagagtctcactgtgtcacccatgctggagtgcagtggcgtgatctcggctcactgcaacttccgcctctggggttcaggtgattctcctgcctcagcctcctgagtagctgggattacaggcacctgccaccacacctggctaatttttgtatttttagtagagatggggtttcaccattttggccaggatggtctcaaactcctgacctcaggtgatccacccgccttggcctcccaaagtgctaggattacaggcatgagccatcgtacccggccagagcatccttaatttttaaaaacaatttagctactttttttttttttttttaactattttaagagcatcacagtaaaaggaaaataacagctcactttggggccaaagtctaaaatttaaaatcagccctactctggctgggtgcagtggcttatgcctataatcccaacactttgggaggcaggaggatcacttgagctcaggaatttgagaccagtctggacaacaaagcaaaaccccatctctgaaaaaaaaaaaataccccgggatggtggcttagggctgtggtcccagctactctggaggctgaggcaggaggattgcttgagcccaggaggttgaagctgcagtaagccatatttgtaccactgcactccagcctgggtgacagagcaagaccttgactcaaaaaaaaaaaaaaattctactctcttggtatttgtaatatgttatgagataccatcattggaggttgtaaggatgggaatattagttgaaagtctgatattttatcattgagttgcccttttccaattttacatgcttaggttgacttctcaatagcaacagtaaaaatcagaagacagtaaaagaatgtcttcaatgttctgaaagaaaatatctacctagaagggttattcacaaaccagggtgaaataatgtcattttaaacaaaatatttaataccaagaaagttggaaacataaaaaaataaaaagtcatgctcggccaaatctaaacagacttaaaaattataagatgtaatttgatggtacaaaaatatggaaataagccccagaaaataacagtatgtaacattggaagaagtctaataatttttaggggagtagagattctgattatcccacatggcagggcattagacaaggagacccactttaccacagataaggttcagtggtggtcccatgactgatctattggtcacaccttatgcttaccccaccacctagaagcggctggtgtgacagagcattggatgacctgctgaaggtggtttgaagtaccagcttagtggcagtacttgacaagcacagggcaccgtcctccaagatgcagtcctggaatcacagacttttatctggtagtgattcctcaatagggagtgtacacaggtccaagagccaaggagtgggaacgggatcagctccacttaacatcatttccagtgatcagtttggagactgaagagcaacagtctgaggaatgaccccaggcagtaatttgtttccacagaaaaaacaaagagcaccagtaaagggtaattatgtaataataaaagatagtgcaagtgcagatttcttattttattagtaactgattaataattataggccaggcgtggtggctcacgcctgtaatcccagcactttgggaggccgaggtgggcggatcacaaggtctggaggtcaagaccatcctcactaacatggtgaaaccccatctctattaaaaacacaaaaaattagcggggcgtggtggcgggcgcctgtagtcccagctactcgggaggctgaggcaggagaatggcttgaacccaggaggcagaggttgcagtgagccgagatcacgccaccgcacttcagcctgggcaacagagtgagactccgtctcaataacagcaacaaaaaaagcaattatataaaacaatatgcagtactgtttggactataacatacagaagtgtaatatgtctaccaataacaccacaaaggaggaggatgggagaagagtcgtgttggggtaaggaaatggctctagatggcaacttaaagccacaagaataagctgagagaaccagaaataggaaataaataggctactgtaacaaaagctgttaatatatactttctcttcatctctcagcctctttaaattataaaatatataaagcaatatttatagcaatgtgttgttgcatttgtaacatagatatatatatcaataccagcacaaaagtcggggtgggggctagaactatataggaataatgggtttataaaagtcttattggaattaaggtagtataaatctgaagtagactctgataagttaatgtgtatttaacacttcctagaacaaacactaaagaaataactgcaaaaatattgtaaggaatcattaaataaataaaatattacattacaaaatatgcacttaagacaaaagtgaaggagaaatagatgaacaaaagatacatgagacataaaatacaaaagggaaagcagcatatgtaaatctaactatatcaataataacttttttttaagagggtcttgctctattgcccaggctggagtgcagttgcatgatcatagctcactgcagccttgaactcttggcttcaagcaattctcccacctcccacctggctattttattttattttatttatttatttatagagatggaggtatcaaactccagggctcaagcaatcctcccattctggtctctcgaagcatcaagattataggcatgagccagcgcacctggccagtaataacattaaatgtgaatagattaaactatcaaaagacacagattgtcaaagtggtgataaaaaaaaatccaaccatgtacagaagacatacatacatactcaaagatacaattggattagaagtaaaggatggaaaaagatataaaacgcaaacagcaaccataataaatctccagtggctttctaatatcagacacaatagagtttaaaacaaaagttttactagagataaagaaaagtattttgtaaagataagtcatcaagaagatgtaacaattataaatagacaattgggattacatcaagctgggaagcttccatactgccgaggaaataacaaaataaagagacaacccacagattgggagaaaatatttgcaaactatccatttgacaaggggttaattgccagaatatacagggagctcaaacaactctatagcaaaaacaaagaaaaataacaaaaaaaaaaccccaaactccagatattccaattataaagtaggcaaaagatccaaacagacgtttctcagagaagacatgcaaatgtctaacaggtatatgaaaaaatgctcaatatcaccacttatcagagaaatgcaaattaaccacaatcagatatcatccctcttcagttaaaatggcttgtatcagaaagacaggaaagaacagatgctggtgaggatatggaggaaggacagccctcgtacactgttggtgggagtggaaattagtacagccactatggagaacagtatggaggctcctcaaagcaactgaaaatagaactattatacgatccagcaaccccactactgggtgaaaagccaaaagaaaggaaatcagtacatcaaagagacacctgcactctcacgtttcctgcagcactatccacaagagccaaaaaatgaaatcaggccaggcgtggtggctcacgcctgtaatcccagcactttgggaggctgaggtgggtggatcacttgaggtcaagagttcaagaccagcttcaccagcctggtgaaaccccgtctctactaaaaatacaaaagttagcggggtgtggtggcagacacctgtagtcccagctactcgggaggctgaggcaggagaatcacttgaacccgggaggcggaggttgcagtgagttgagattgaactgctgccctccagcctgggcgacagagtaaagctccatctcaaaaaacaaaacaaaaaaaaaatcagagcccatcaacaaatggataaagaaagtgtgatatatataaacacagtcaatatgtctattcagtcataaaaataaaatcctgtcatttgcagcaactgggatggaactgaaagccattataataagtgaaataagccaagcacagaaagacaaatattgcatgttctcactcatatttgaaagctaaaaaagtagacctcatgaagatagagttgatggtggttaccagaagctgggaagagggggaaggatgaaggggaaaaatatgaatgtatctattattgctgaactgtacacttaaaaatggtaatgatgataatatttataatatatttacattttgtttatatatttatattttgcctcaaaaaaggcaaaaaagaagatataataattataaacatgtatgtacctaataacagcaccaaaatacatgaagcaaaatctgacagaaatgaagagagacaactcaacaatactagttggagacttaatatcccactttcaatattagaacaatcgtataagttgtctaggactgtcgtaacaaagaaccacaaactggatggcttaaacaacacagatatattgtcttactgttctggagcctccatgtttgaaatcaaggcattgacaggttttggttccttctgagggctctgagggaaggatctgttccaggcctctctccttggcttgtagatggctgtcttctcactgtctcatcacataatctcccttctatatgcacatatctctgtgcaaacgtcccctttttatagggacatcagtcatattgactcctaagtcctcattttaacattgttaactctgtacagaccctctctccaaataaggcctcactctgaggtatggaaattaggaccccaacatatctctttgagttggggggacactactcaacactgaagtgtttagggatgtcgagaaattatgcctccaacctatgctcatacattttttttttctttttcattttttttttttttttttgagacggaatctcactctgtcaccaaggttgaagtgcagtggcaccgtgtcggctcactgcaacctctgcctcccgggttcaagtgattctccagcctcagcctcctgggttcaagtgattctccagcctcagcctcctgagtagctgggattacaggtgcccaccaccacgcccagctagtttttatatttttagtagagacaggttttcaccatgttggccaggctggtcttgaactcctgacctcaggtgatccacccacctcggcctcccaaagtgctgggattacaggcgtgagccactgtgccctgccaatgcttatacatttcaagaaaaacatttatttggccgggcatggtggctcacatctgtaatcctagcattttgggaggccgaggcgggtggatcacctgaggttgggcgtttgagaacaacctggccaacatggtgaaacccccgtctctactaaaaatacaaaaattacccaggcgtggtggcaggcacctgtaatcccagctacttgggaggctgaggcaggagaattgcttgaacccgggaggcagaggttgcagtgagccgggatcacaccactgcactccagcctgggtgacagagtgaaactgtctcagaaaaaagaaagaaagaaaaacgtttatttgtagagaaagctaacatggtaaaaatttgaggaatattggtaaagaatatttacaaattcattatcattgtgtaaattctatattactttttaaactttcatgttttgtggagtcatttctaaatcaaatcattaaaaagaggccaggtgtggtgactcacgcctgtaatcccagcactttggaaggccaaggtgggcggatcacttgaggtcaggagtttgagaccagtctagccaacatggtgatagcccctgtttaccaaaaatacaaaaattagccagggtggtgacgtgcacctgtaattccagctactcgggaggctgagacgggagtatcacttgaactcgaaaggtggaggttgcagtgagccgggatcacatcactgcactccagcctgggtgacagagtgagaccctgtcacacacaaaaaattaaagtcattaaaaagaaaaactgaattttgcaaaattattggatgtcagtatattcaaatcaattttatttctatatatcagaaaaataatataaaatgggatttaacaaattgaatcaattttcagtggcatcaaaatacaaaatagatacaaatcttatggtgttggaactgttcagcatcttgaaggtggttgttgatacatgaacctacactggtgataacattgaacagaacttaatatacacacatacaaagtataagtaaaactggggaaatgttaagtattgtgtgtcagtattctggctgtgatatactgtagtgttgcaaaatgttagcattgggggaaactgggaaaagtgtataagggatctctgcattattttgtatactctaggtgaaactatctcaatacaaatttaattaaaacaaaataaatctgataaagatgtaaaagaataaagagactattatccagttgataaaatatgcaactatgaaataaactgaataaattgaacaagcttgaacaaattgaatcatcaatatgttcaagtcctagacatttaatagtgataaatgttattccccaaatactgtatgtagtataacatctttgttaaaggccaagataaagcaaaatggagttatatattgtttaggcatatgtgtttatgtgacaaaacaacggggaaaaaaagctagaaaatgataatcaaaatctttaggatagtgtctacaccctgtggaagaagcagtgagttggaaaaagggaacactaagtagaggcttcaagttatttttaattttctgtttgggtgaaagattcaagagcattcgtgagaatgtacttgtaactagtatttgatgaacaggggctatacaacagtttagattttaaaaaattatgggagaatactaaggataaccatacgccagtcaaataaaaatagataacacatttttcagttttctagaatactgcacattatcaaaactgaccaaagcagaaaaagcaagactgaataaaatcaacaataaataacaaaattgaattggagtatcaaaagcttccctcagtgaaatatagcaaagcccagatggatgtccaataaaattttagcaaacattaaggacttgattatcattatgtaagcagtattagagaatttttaaaatatagattacttccaaattcacctagaaattcttttataacctttacaccaaatcaggatagagacagtagaagaaaaaataaatacaggtcaatctaatatatgaaaattttctgagtaaatgaaatccaggtctctttcgccatacatttgtatatgaggttgaaccataggaaattacaataatcaaccatgttttacatatgtggcagattttattttctgaagtgggctatgacagtagcttccatctcatctcctcttctacagtgtgatcttgccactcctcccacttatagtcttgccccatcctttgagttttgttggcttgtgagtcacttgtagccaaaagaatgtggaggaagtgatcatgtaacttcgcaggatataaaaagccatgcggcttctgccttgattgcagagatccttcatttgccatgtaagcagtccttgaagctgcagtactaggaggaaatctcaaataatccatatagagaaaccacatagagaggctctgagattacataaagagatgcttgttcagccccatatgctcccgttccatgcctttctggctccatgagaaattctgacccagaacggctcagtcagacctctcctgaatccctgacaaacaggaaccatcagaaataataacgtctttgttgctatttgtgctataatgttttgaggtgatacgttagactacagtagtgattggaatagaaatttagtgttggaagtggggttctacttacatgcatcactggccttggcactggatgatgagcagaatctgaaaggcccttgagtaaaatatcagtaaaacccagtgggctttggggatggtattagcagagtctaaaagtcatcaaggaggttgctggtgagagcttgaaggaacacaaggaaagcattattgaaacatggagaaaatgagacttttttatgtagtgacaggtgtatcaacactgtcacctaatgtaaatggaaaatagaagatgtacctcatgacctcagtgatagagctaagtgttttctagacccagtgttcaggatgctacctggctcctcattgcttataataaaatgagaggaaagagaactaaaaaatgaaccattccatggaggaaatggtaaacagtcttttcagcttgtaaagcattctcaaagtacgaaagctcctcagggaaaagatgtaatccaaggctggctataatacccttatgtaagattccagaaagatctgaagcggtgcctcctgacccccttcaatgaataaacaaaaaggacttctaaggacttgagagaatgcttctgtgagccctctctcataagcaacagaactgctaagaattttaagggtgaggtcccacaaaaggcccactgagagcccatagtagagaaagtcttattaagagatttttggggtgtggcttttgtctaatggaatgggttgtacacagatagctaaaaatcccacacgttcttaaaaacagtgatgctaactttacagataaggacaaactgtataaaaaaagatatttgaactctcaacctttttgctcaggaaggaggttgagaaggatactcacttgcaaacatggtcacattttatgaaaaaccatggatgactcagagagcagaactaagatccagagggtagagcaaagagccatggaggagaagtccaagaaagcagaaccaaaccctaatcaccgaactggtaatgggtacccagtaggatttatggatttctatggaacagtgactactctgtgcctcctcttgtccccatttttgaataggagtattggtaacagtttttctgtgtctgccccactgttacgttctgggtgtgtaagatgaaaataacttgtctcatatttcacaggcattcagattgggagaaatagcacctcaggaactgcatcctcaagagtcccatctgcacctgtagcagagtttgacgatgagatcctggtcttcaatctgatattataacgggatgagacattgggatcttgggggaggagatggctgtactttgcatgggggggatgtgaattgttacagccagagggcagaccgtggtaatcccaaacatggccaaaacagtatctcctatcacacattctcttccacagtgtgcctgctatatatttctcccatgagagttgaggtcgacaccagctccttgaacctgggtggacttgtaatttgcctgtagccaacagaatgcagcagaaataggccaggtgcagtggctcatacctgtaatcccagagcttcaggaggccaaggcaggaaaattgcttgagcccaggagtttgagaccagcctgggaaacacagtgagaccccgtttctatttaagaaagaaaaaaaagaatgcagcagagatgaagctgtgtaacttccaaagctaggtcataaaaggtgatgcagcttccatcttgtcactggaattcacactcttgaaccattcagcagccatataagcagtccaatggccctgagctgccctgcagtaagaaagcccaaactagctcacacacagactacatcaagagtgagagatgcctaaaacacccccaggcattccagccccttctgttctagatctagccttagaaaaagctgcctagctgagcctatcttgaatttctgacccaggaaactattagatataataagtcacttttttttttttttgagatgcactctcactctttcccaggctggagtgcagtggcacgatcctggctcactgcagcctcctcctactgggttcaagcagttctctgcctcagcctcccaagtagctgggattacaggtgctcgccaccatacttggctaatttttgtatttttagtagagatggggtttcaccatcttgggcaggctggtcttgaactcctgacctcatgatccacctgcctcggcctcccaaagtgctgggattacaggcgtaagccactgcgcctggccaataagtctctttttttaggtaatcaagttaaaataataagtcactaaattttgaggtgttctgttatgtagaagagtgactggaccaacccataaaaaggacaacttcatatagttcaactttttttttttttttttttttttttgatacagagtctcgttctgtcacccaggctggagtgcagtggcataatttcagctcatggcaacctccgcctccaaggttcaagtgattatcatgcctcagcctcccaagtagctgagattacgggcacctgccaccacgcctggataatgtttgtatttttagtagaggtggggtttcaccatgttgactaggctggtctcgaactcctgacctcaggtgatctgcccgccttggcctcccaaagtgctgggattacaggcatgagccattgcatctggcctagttcaactttataaataaatatgtcaaagataattcaatattaaagtttatatatttatcattttaaccaaataatgtagaaatagagtgatatgaaacataaatacctatataggttaagaaaaatattcaataaattggaacaattctttgttataaaattcttaagaaactcagaataaaatgcaacacctttttacgattataaacccctcagcaaacatacttcaagcagaaccttacgaacagtataattaaaatgaggaaccgctga

SEQ ID NO: 98 - protein, 533 aa, Homo sapiens
MATSFRTASCWGLLSFKDISMEFTWDEWQLLDSTQKYLYRDVILENYHNLISVGYHGTKPDLIFKLEQGEDPWIINAKISRQSCPDGWEEWYQNNQDELESIERSYACSVLGRLNLSKTHDSSRQRLYNTRGKSLTQNSAPSRSYLRKNPDKFHGYEEPYFLKHQRAHSIEKNCVCSECGKAFRCKSQLIVHLRIHTGERPYECSKCERAFSAKSNLNAHQRVHTGEKPYSCSECEKVFSFRSQLIVHQEIHTGGKPYGCSECGKAYSWKSQLLLHQRSHTGVKPYECSECGKAFSLKSPFVVHQRTHTGVKPHKCSECGKAFRSKSYLLVHIRMHTGEKPYQCSDCGKAFNMKTQLIVHQGVHTGNNPYQCGECGKAFGRKEQLTAHLRAHAGEKPYGCSECGKAFSSKSYLVIHRRTHTGERPYECSLCERAFCGKSQLIIHQRTHSTEKPYECNECEKAYPRKASLQIHQKTHSGEKPFKCSECGKAFTQKSSLSEHQRVHTGEKPWKCSECGKSFCWNSGLRIHRKTHK

SEQ ID NO: 99 - DNA, 3282 bp, Homo sapiens
aacttgcgcgctgagatttccggcgtgggagcagaggtctgagtcttgcgtgggtcctctatatagggtgagaagcgtggcgctcggttcctgcctcggggaagtcctggcgcagatgggccacggggccggcgtggcggcgcctgggaccgactgaggcctaggcgccggagccggccgcgcctgggctggagcggggctcctcggcctggactgggagcccccggccccgggctcctgctggcgccgtccaaccttacatgggttcagggcgccttcgtaggcgggcacggctggtttcgggctaaggcgctctggagacctgacgatggcgtcgggcccgggctcccaggaacgggaagggctcctgatagtgaagctggaggaggactgcgcctggagccaggagctgcccccacctgacccaggaccgagccccgaggcctcccacttgcgcttcagacggttccgcttccaagaggcagctggtccccgggaagccctcagccggctccaagagctttgccatgggtggcttcggcctgagatgcgcacgaaggagcagatcttggagctgctggtgttagagcagttcctgaccatcctgccccaggagatccagagcagggtgcaggagctgcatccggagagcggcgaagaagcggtgacccttgtggaggatatgcagagagagcttgggagactgagacaacaggtcacaaaccatgggcggggaacagaagtgcttttggaggagcctttgcctctggaaacagcacgagagtcaccgagcttcaagctggagccaatggagactgagcgaagccctggccccaggctgcaggagctgctaggccccagcccccaaagggacccccaggctgtaaaggagagggcattatctgctccctggctttctctttttcctcctgaagggaacatggaagacaaggagatgactgggccccagttgcctgagagcttagaggacgtggcaatgtacatctcccaggaggagtgggggcatcaggatcctagtaagagggccctctccagggacacggtgcaggagagttatgagaatgtggactcactggagtctcacattcccagtcaggaggtcccaggcacccaggtgggacaaggaggaaagctatgggatcccagtgtccagagctgcaaggagggcctgagccccagaggcccagctccaggagaagagaaatttgagaacctggaaggtgttccgtctgtatgctctgagaacatccaccctcaggtgctgcttcctgaccaggcccgaggggaggtgccctggagtcctgagctgggaagacctcatgaccggtcgcaaggggattgggcgcctcccccagagggtggaatggagcaggccttggcaggagcctcaagtggcagagaactggggcgaccgaaggaactgcagccaaagaaactccatttatgtcccttgtgtggcaaaaatttctctaacaactcaaacctaattaggcaccagagaatacatgcagctgaaagactgtgtatgggtgtggactgcactgaaatctttggtgggaacccacgtttcctgtcactacacagagcacacctgggagaggaggcccacaagtgccttgaatgtgggaaatgcttcagtcagaacacccatctgactcgccaccaacgcacccacacgggtgagaagccctatcagtgcaacatttgcggaaaatgtttctcctgcaactccaacctccacaggcaccagagaacgcacactggggagaagccctacaagtgccctgagtgtggggagatctttgctcacagttccaacctccttcggcaccagagaattcacactggagagcgaccttataagtgtcccgagtgtgggaaaagtttctctcggagttcacacctcgtcattcacgaaagaactcatgagagagagagactttaccccttctctgagtgtggggaagctgtgagtgacagcaccccctttcttacaaaccatggagcccataaggcagagaagaagctctttgaatgtttgacttgtgggaaaagcttccggcagggcatgcacctcaccagacatcagagaacacacacaggagagaaaccgtataaatgtaccctttgtggggaaaacttctctcatagatccaatttaatcaggcaccagagaatccacacaggagaaaaaccctatacctgtcatgagtgcggagacagcttctctcacagctccaatcggattcgccacctgagaacgcatacgggagagagaccctataaatgttctgaatgtggagaaagcttctctcggagttcccgtcttatgagtcatcagagaactcacacaggttagtaacagtggggtttctctttgccccaggtgaggtggcatattcagaggagcctgttggcaagagctggtattccctgcccagccgaccaaatgacctctgcattcttcaggtaatgggggctcattgtgagggaggtgcagaggcagcagaggattggcataaaactgaaaaggagttctgtctgcatgagaaaggatggcaagtctctgaggtgacctcagggtggaattctctgttaagtccaccctgccccagggtgctcctaccctcttggtctttttaaagccaaggtgcgatttgggcacctgactgtccagtttaccttaacaagtttgggaatccatgtgatgtttttgatacttcttcctcatttgggacattcagtaggagcatttgggcttccggggcccctgagaccaaagaagaggggccaagtaccctgggaaatcagctgaaggtcaacaaaagactggttgtgagttgcagctgtcccgaaggccccagttgggaagccatgggcagtccagatcaagccaccacgtgccctacgatggcctaacaggagtgcccattggcagattacacatgtaaatatgacctcagacaaaaaggaaccagaggcccaagggcaataataaggtggaatttgcaggtcagcccaggaattggcagaggaagtaggtgtctgataaccctttgtggagaatgagattccccccacctgtgtgagaaaaataaacagctctggagtcttgttcctgactccagaggaacgagagcattccaggaaagagagattccctggaaaattgaaaatgtgaatcctagggggaaattggggattgtgtctttccctgttgaaaatgtttggatgggaataaatatcttcaggaaacataaa

SEQ ID NO: 100 - protein, 683 aa, Homo sapiens
MASGPGSQEREGLLIVKLEEDCAWSQELPPPDPGPSPEASHLRFRRFRFQEAAGPREALSRLQELCHGWLRPEMRTKEQILELLVLEQFLTILPQEIQSRVQELHPESGEEAVTLVEDMQRELGRLRQQVTNHGRGTEVLLEEPLPLETARESPSFKLEPMETERSPGPRLQELLGPSPQRDPQAVKERALSAPWLSLFPPEGNMEDKEMTGPQLPESLEDVAMYISQEEWGHQDPSKRALSRDTVQESYENVDSLESHIPSQEVPGTQVGQGGKLWDPSVQSCKEGLSPRGPAPGEEKFENLEGVPSVCSENIHPQVLLPDQARGEVPWSPELGRPHDRSQGDWAPPPEGGMEQALAGASSGRELGRPKELQPKKLHLCPLCGKNFSNNSNLIRHQRIHAAERLCMGVDCTEIFGGNPRFLSLHRAHLGEEAHKCLECGKCFSQNTHLTRHQRTHTGEKPYQCNICGKCFSCNSNLHRHQRTHTGEKPYKCPECGEIFAHSSNLLRHQRIHTGERPYKCPECGKSFSRSSHLVIHERTHERERLYPFSECGEAVSDSTPFLTNHGAHKAEKKLFECLTCGKSFRQGMHLTRHQRTHTGEKPYKCTLCGENFSHRSNLIRHQRIHTGEKPYTCHECGDSFSHSSNRIRHLRTHTGERPYKCSECGESFSRSSRLMSHQRTHTG

SEQ ID NO: 101 - DNA, 3268 bp, Homo sapiens
agttagagctcgggtctcctcgccacagctccgagtctttcgttctgggaggcccaggcggcttcgcgttctgagaataaacagaacctctgttgctctgcgacttgcaggcactgggagattcgtagctaagacgccagggcatcccggaagctgggaaatgggactgttgacattcagggatgtggccgtagaattctctttggaggagtgggaacacctggaaccagctcagaagaatttgtatcaggatgtgatgttagaaaactacagaaacctggtctctctgggtcttgttgtctctaagccggacctgatcacctttttggaacaaaggaaagagccttggaatgtgaagagtgaggagacagtagccatccagccagatgtgttttcgcattataacaaggacctgttgacagagcactgcacagaagcttcattccaaaaagtgatatcgaggagacatgggagctgtgatcttgagaatttacatttaagaaaaaggtggaaaagggaggagtgtgaagggcacaatggatgttatgatgaaaagacttttaaatatgatcaatttgatgaatcctctgttgaaagtttgtttcaccagcaaatactttcttcttgtgccaaaagctataactttgatcaatataggaaggtctttactcattcatcattgcttaatcaacaagaggaaatagatatttggggaaaacatcacatatatgataaaacttcagtgttatttaggcaggtctctactctaaatagttaccgaaatgtttttattggagagaaaaattatcattgcaataattctgaaaaaaccttgaaccaaagctcaagccctaaaaatcatcaggaaaattattttctagaaaaacaatacaaatgtaaagaatttgaggaagtctttcttcagagtatgcatgggcaagagaaacaagaacagtcttacaaatgtaataaatgtgtagaagtttgtacccagtcattaaaacatattcaacatcagaccatccatatcagagaaaactcatatagctataacaaatatgataaagatcttagtcagtcatcaaatcttagaaagcagataatccataatgaagagaaaccatacaaatgtgaaaaatgtggggatagcttaaaccatagtttgcaccttactcaacatcagatcattcctaccgaagagaaaccctgtaaatggaaagaatgtggcaaggtctttaaccttaactgtagtttataccttactaaacagcagcaaattgatactggagaaaacctttacaaatgtaaagcatgtagcaaatcttttactcgttcctccaatcttattgtgcatcagagaattcacactggagagaaaccatacaaatgtaaagaatgtggcaaagcctttcgctgtagttcataccttactaaacataagcgaattcatactggagagaaaccttataaatgtaaagaatgtggaaaagcttttaaccgtagttcatgccttactcaacatcagacaactcatacaggagaaaaactttacaaatgtaaagtatgtagcaaatcttatgctcgttcttcaaatcttattatgcatcagagagttcatactggagagaagccttataaatgtaaagaatgtggcaaagtctttagccgtagttcttgccttactcaacatcggaaaattcatactggagaaaatctttacaaatgcaaagtatgtgctaaaccttttacttgtttctcaaatcttattgtgcatgagagaattcatactggagagaaaccctataaatgtaaagaatgtggcaaagcctttccttatagttcacaccttattcgacatcatcgaattcatactggagaaaaaccatacaaatgtaaagcatgtagcaaatcttttagtgactcctcaggtcttactgtgcatcggcgaactcatactggagagaaaccctatacatgtaaagaatgtggcaaagcctttagttatagttcagatgttattcagcatcggagaattcatactggccagagaccctacaaatgtgaagaatgtggcaaagccttcaactataggtcatacctcactacacatcagagaagtcatactggagagagaccctacaaatgtgaagaatgtggcaaagccttcaactctaggtcatacctcactacacatcggagaagacatactggagagagaccctacaaatgtgatgaatgtggtaaagccttcagctataggtcatacctcactacacatcggagaagtcatagtggagagagaccctacaaatgtgaagaatgtggcaaagcctttaactctaggtcatacctcattgcacatcagagaagtcatactagagaaaaactttaaaaatgtaaaacatggagcagattttttacttgttacccatgtcttattgtgcatcagataatttatatgggagtgaaaccctacaaatgttaagaatgtggcataacctttaactattttcaagccttacacaatagcagagaatataaactgaaaaaatccatacaaatattaaaaatgtggcaaattattttaaactgtgctcaacccttactcaagataatccatactagagaaacactatagatgtaaaaatgtgaaaagttttattcaaaatatcaaacttatgagtcacctaggggttcatagaaaaaggaagtttgcagatgcaataaatgtgaggaagtatttaataaaaaatgaagtctaaatgtgtcagagaatttatgtgagaaaggactaaagcacagacactttcagcctttatactaaataagagtattttttgtacagaataatctaaaggcaaaataattagataatttatttgcttatatgttttaaagtagcaagaacattgatgttttgacaggtatatttcatagatacttcatttgtatttacagtatttgaggtttttggaaagcaaatattatttatataattcagctttcaaatctgttgctgcttttccttaatccgtggtgttcatgtgaaaatatgtgttctgtttttttttctgcatcagaacaatgtgaggtcattctacgttaatatcattaatatcagcatttttcatggaagtttaatgccaaatgtaaaacacatgaaaatttttaaaaatatgctctttgtgtttgaataaagtagtaatgcatgtaaacatatacgtgtttagagctcttttctatattaaagtaagagggatattctgaa

SEQ ID NO: 102 - protein, 743 aa, Homo sapiens
MGLLTFRDVAVEFSLEEWEHLEPAQKNLYQDVMLENYRNLVSLGLVVSKPDLITFLEQRKEPWNVKSEETVAIQPDVFSHYNKDLLTEHCTEASFQKVISRRHGSCDLENLHLRKRWKREECEGHNGCYDEKTFKYDQFDESSVESLFHQQILSSCAKSYNFDQYRKVFTHSSLLNQQEEIDIWGKHHIYDKTSVLFRQVSTLNSYRNVFIGEKNYHCNNSEKTLNQSSSPKNHQENYFLEKQYKCKEFEEVFLQSMHGQEKQEQSYKCNKCVEVCTQSLKHIQHQTIHIRENSYSYNKYDKDLSQSSNLRKQIIHNEEKPYKCEKCGDSLNHSLHLTQHQIIPTEEKPCKWKECGKVFNLNCSLYLTKQQQIDTGENLYKCKACSKSFTRSSNLIVHQRIHTGEKPYKCKECGKAFRCSSYLTKHKRIHTGEKPYKCKECGKAFNRSSCLTQHQTTHTGEKLYKCKVCSKSYARSSNLIMHQRVHTGEKPYKCKECGKVFSRSSCLTQHRKIHTGENLYKCKVCAKPFTCFSNLIVHERIHTGEKPYKCKECGKAFPYSSHLIRHHRIHTGEKPYKCKACSKSFSDSSGLTVHRRTHTGEKPYTCKECGKAFSYSSDVIQHRRIHTGQRPYKCEECGKAFNYRSYLTTHQRSHTGERPYKCEECGKAFNSRSYLTTHRRRHTGERPYKCDECGKAFSYRSYLTTHRRSHSGERPYKCEECGKAFNSRSYLIAHQRSHTREKL

SEQ ID NO: 103 - DNA, 3651 bp, Homo sapiens
cttcttctccctggccgacccgagcggggaacagcactcccaggatgcagtttgtgtcaacacggccgcagcctcagcagctgggcatccagggcctggggctggacagcgggagctggagctgggcccaggctctgcccccggaggaggtctgccaccaggagccggcgctgcgcggggaaatggccgagggaatgccgcccatgcaggctcaagaatgggacatggacgcccggcggccaatgccttttcagttcccaccctttccagatagggcacctgtcttccccgaccgcatgatgcgagagccccagttgcccacagcagagatctcactctggactgtggtggctgccattcaggctgtggagaggaaggtggatgcccaggccagccagctgctgaacctggaggggcgcacggggacagccgagaagaagctggccgactgtgaaaagacggccgtggaatttgggaaccacatggagagcaagtgggccgtgctggggaccctgctgcaggagtacgggctgctgcagaggcggctggagaacttggagaacttgctgcgcaacaggaacttctgggtcctgcggctgcccccgggcagcaagggggaggcccccaaggttccagtgacttttgtcgacattgctgtgtacttctccgaagacgagtggaagaacttggacgaatggcagaaggagctttataacaaccttgttaaggagaactacaaaaccctcatgtccctggacgcggagggctcagtccccaagccagatgctccagtccaggctgagcccagggaagaaccttgtgtgtgggagcagcgccaccccgaagagagagaaatcccaatggatcccgaagcaggagcagagcccctggtgcctgcgcaggatgcgtcctcccaggtgaagcgtgaggacaccctgtgtgtccggggtcagcggggcctggaggaaagagccatccctacggaatccattaccgactccccaatttctgcccaggacctcttgtcccggattaaacaggaggagcatcagtgcgtgtgggatcagcaggatttggcagacagagatattcccacggatcccaattcagagtctctcatctcagcacatgacattttgtcatggatcaagcaggaggagcagccatacccatggggaccacgcgactcaatggacggagagcttggattagactctggccctagtgacagcctgctgatggtgaagaacccacccccggccccgccacagccccagccccagccccagccaccgcagccgcagctgcagtcgcagccccagccccagagcctgccccccatcgcggtggccgagaacccgggcggccccccgagccgagggctgctggacgacggtttccaggtgctgcccggggagcgtggctccggcgaggcgccgccgggtggggaccgcagcaccgggggcggcgggggcgatgggggcggtgggggcggcggcgcggaggcggggacgggggcaggcggcggctgtggcagctgctgccctggcgggctgcggcggagcctcctcctgcacggcgcccgcagcaagccctactcgtgccccgagtgcggcaagagcttcggcgtgcgcaagagcctcatcatccaccaccgcagccacaccaaggagcggccctacgagtgcgctgagtgcgagaagagcttcaactgccactcgggcctcatccgccaccagatgacgcaccgcggcgagcggccctacaagtgctcggagtgcgagaagacctacagccgtaaggagcacctgcagaaccaccagcggctgcacacgggcgagcggcctttccaatgtgcactgtgcggcaagagcttcatccgcaagcagaacctgctcaagcaccagcgcatccacacgggcgagcgcccctacacgtgcggcgagtgcggcaagagcttccgctacaaggagtcgctcaaggaccacctgcgcgtgcacagcggcggcccgggccccggcgccccacggcagctcccgccgcctcctgagcgagactagggctgggctgggggagggcagggccggacggagtggatcgggggcggcctgagcaccaaccaccttgccgggtgtcctcagccaccgtctggaaatcggcaacaggcattgcactccggttgggggtcccccagggtggggcagggatcccccagatctgtctggtctgaatggacgcccagctcatctagggtggacccagctgctggggaagagccagggggaccgcgaggagccgagcgtcctcgggcaccgccctcacacctcctcgagtgccctgggaccactgggccacagatggtcatcaggggaagccaccagggagtcccgaagcccttctgagatcaggaaatcaggtcccaaggttaggagacgccctgaaaaaaagcgaaggccgagggatgtgctaagggtaacaccttcatgatgacaacactgcctcgcgtttcaatagcgctttatacttttttaagtgttttctatccgttatccatttcacccttggcctatccctctcagataggtggggtaggattttcctggtgaccgagtaaagtgagaggcaggtgagacggttcacccaatcacacgggaaggggcgcgcgctgcccaaccgcgctctccgcctacctccgctgctcgggaagctgctggcctggccctcctggtctctcttcctttcctggtctctcttcctttccttgctctcacccacggataaaaccagaagcgacaggaggccagctcctggggttcctgggagccgggaacagattggctacggaacgccccaggttgtacattcagagggctctttctccatgggagctcctggtgccgcctcggccccagcctgtccccagcccctcaatctggtgcagcagcatcttgtcactgcacaacagtggcctggtcccccacaggcagttagggccccaggtcagacctcaccatgatgatttgttccagttctcccagggcagaggggcgagggagaggcttttgctgtgagagtagccgtcacgtgtctcttcccagcagcgccgggcaagtgggtgctagagtctgagcctcaggctctcctgccctgggcctcccaattggtgctatctgttactgcccgtgctcacggacatggatacagaccctgctgtgctccacaccctgcaggcgcctcgggaagcgcccaaaggattccccttcacgttggtgcacctgctccatagctccgggcgctgcgtcccgaggggccacagtctccatttcagcgtcttgcatggcctggcaccgggtggggtggtatgccccaggacccttgtttgtgtcaaaaatgactttccctgcccttgccgtgggtccggcgttcctcccagccgggatcacagtgggcagccggcacccggcaccactttggcgagcgtcctgcttccgccctcgccctcatctacgctgctccgctttcctcagacccctttttgccgtgcaaagggaattcttgacattaaataaaaggtatccagattgcagactgcatgttcacagagctgggggttctccagcttgcctacagtaaagcctcaatgaactggaa

SEQ ID NO: 104 - protein, 671 aa, Homo sapiens
MQFVSTRPQPQQLGIQGLGLDSGSWSWAQALPPEEVCHQEPALRGEMAEGMPPMQAQEWDMDARRPMPFQFPPFPDRAPVFPDRMMREPQLPTAEISLWTVVAAIQAVERKVDAQASQLLNLEGRTGTAEKKLADCEKTAVEFGNHMESKWAVLGTLLQEYGLLQRRLENLENLLRNRNFWVLRLPPGSKGEAPKVPVTFVDIAVYFSEDEWKNLDEWQKELYNNLVKENYKTLMSLDAEGSVPKPDAPVQAEPREEPCVWEQRHPEEREIPMDPEAGAEPLVPAQDASSQVKREDTLCVRGQRGLEERAIPTESITDSPISAQDLLSRIKQEEHQCVWDQQDLADRDIPTDPNSESLISAHDILSWIKQEEQPYPWGPRDSMDGELGLDSGPSDSLLMVKNPPPAPPQPQPQPQPPQPQLQSQPQPQSLPPIAVAENPGGPPSRGLLDDGFQVLPGERGSGEAPPGGDRSTGGGGGDGGGGGGGAEAGTGAGGGCGSCCPGGLRRSLLLHGARSKPYSCPECGKSFGVRKSLIIHHRSHTKERPYECAECEKSFNCHSGLIRHQMTHRGERPYKCSECEKTYSRKEHLQNHQRLHTGERPFQCALCGKSFIRKQNLLKHQRIHTGERPYTCGECGKSFRYKESLKDHLRVHSGGPGPGAPRQLPPPPERD

SEQ ID NO: 105 - DNA, 5684 bp, Homo sapiens
agaagctcctctcccagcctgcgagcatttccaggctcttgtttcccatcagcctctgggtccaaactaaccacaggtctctgggtccttttccggtgtccttaaggttcttggactctgcatgtgctgccaggttgccagatttctaagaaggagtttgaagaggagaaaaggatttttgcatgtttagaaatcaaggttcaggagaatcttgacagtgaatgtgtctcattacattgaataacagctacaggatgttcgagagctgatggagtctcgctctgtcgcccaggctggagtgcagtggtgcgatcttggctcactgcaagctccgcctcctgggttcacgctattctcctgcctcagcctcctgagtagctgggactacagttctggcttttctggattctgtgcttcaccaatagaggaatcccatggagcattaattagttcttgcaattccagaaccatgactgatgggttggtgacattcagggatgtggccatcgacttctctcaggaggagtgggaatgcctggaccctgctcagagggacttgtacgtggatgtaatgttggagaactatagtaacttggtgtcactggatttggagtcaaaaacgtatgagaccaaaaaaatattttcagaaaatgatatttttgaaataaatttttcccagtgggagatgaaggacaaaagtaaaacccttggccttgaggcatccatcttcagaaataattggaagtgcaaaagcatattcgagggactaaaaggacatcaagagggatacttcagtcaaatgataatcagctatgaaaaaataccttcttacagaaaaagtaaatctcttactccacatcaaagaattcataatacagagaaatcctatgtttgtaaggaatgtgggaaggcttgcagtcatggctcaaaacttgttcaacatgagagaactcatacagctgaaaaacactttgaatgtaaagaatgtgggaagaattatttaagtgcctatcaactcaatgtgcatcagagatttcatactggtgagaaaccctatgagtgtaaggaatgtgggaagacctttagctggggatcaagccttgttaaacatgagagaattcacactggtgagaaaccctatgaatgtaaagaatgtgggaaggcctttagtcgtggctatcaccttacccaacatcagaaaattcatactggtgtgaaatcttataaatgtaaggaatgtgggaaggcctttttttggggctcaagccttgctaaacatgagataattcatacaggtgagaaaccttataaatgtaaagaatgtgggaaggccttcagtcgtggctatcagcttactcagcatcagaaaatccatactggtaagaaaccttatgaatgtaaaatatgtggaaaggctttttgttggggctatcaacttactcgacatcagatatttcatactggtgagaaaccctatgaatgcaaggaatgtgggaaggcttttaattgcggatcaagtcttattcaacatgaaagaattcatactggtgagaaaccttatgaatgtaaagaatgtggaaaggcctttagtcgtggctatcacctttctcaacatcagaaaatccatactggtgagaaaccttttgaatgtaaggaatgtgggaaggcctttagttggggttcaagccttgttaaacatgagagagttcatactggtgagaaatcccatgaatgtaaagaatgcggaaagaccttttgtagtgggtatcaacttactcgacatcaggtatttcacactggtgagaaaccctatgaatgtaaggaatgtgggaaggcttttaattgtggatcaagccttgttcaacatgaaagaatccatacaggggagaaaccctatgaatgtaaagaatgtgggaaggcttttagtcgtggctatcaccttactcaacatcagaaaattcataccggtgagaaacctttcaaatgtaaggaatgtgggaaggccttcagttggggttcaagcctagttaagcatgagagagtccatactaatgagaagtcttatgaatgtaaagactgtgggaaggcctttggtagtggctatcaacttagtgttcatcagagatttcatactggtgagaagctttatcaacgtaaggaattcgggaagacctttacttgtggctcaaaacttgttcatgagagaactcatagtaatgataaaccctacaaatataacgaatgtggggaagcctttctgtggacaacttactcaaatgagaaaattgatactgatgaaaccttatgattgaaagttgtaaaagaatattttgtgtgtgtgtatagacaacttatcataataagaactcttactcttgagaaaccttgtgaatgtaagggttgtgcaaaagccattcatttctgtttatgggcaattatcttgctatccagcaattcatactagtgagaaatattttgaatataattaatatgaaaaggcctttagacttctgtacagtcttattggatatcaatttatactgatgtaaaatcatttaaatgtaaggaatgtgtgaagatcttcattcatgacataaggtctgattaacatcaaataattggtatttgttaaaaagagtttaaataggaggaatgtgggaaggacctaaacttaattcagttcttgctgcacatcagagaattcatactgctgtgtaatcctatgcacataaggaatttgggaaggcttatagacacagtaaatatcttagagtacatcagagaattcatccaaatgagaaatcatttgaattagaattataggaaggcctttagacaaatgctacccaaattattatccagagactggtgcagtcataaaattgtcatctgtcaattgtgagataaacgtggaaagtgagtaaatatttggaacttttatagcaatttgacatttccataacattctgttttacaaaattatcagtccataaatgattgagaattgaaaacaaagtttgttctttcccagaaataatttgagacaagactcacacttttcaagacatgagacaagtgacaatttaaataagaaattcttcacttgcacctctctgattagaatagcagaatattcatactatagcaagatttggcaaatgagggaatcaaaattttctaatgcctgtaacagcataagataatttataccagatatgttaaatgtgcagaagccttccaacactattcagtctttgttaaacttcagtaagttcatcctagagagtaactctgttaatgtaacaaatgtaggaaaacccttatccatggcaaataccatactgtcatcaccatttcacctccatactacctgtaggatggtgagcaaaatgcttatctcttctggacatgatgtttcaaatgctgatggtaactaataatgctgttacagagattagatggatttagtatgcatcatatccttggaagagtatctggtatgtagcctatgcttaatacatattagctattgttcatattgtctttattattagtattactactggtgaattcttaggagaggcacaaccgttttgaggaatgaattcagaaaagcttcccataaccactcatccatttgaatttcagatagttcattctggataagatctagtacagtataaagaatttgaggggattttaattcagagtttatcccttaagctgagctaaaaaaatgagacttgaaaaaatccagacttttgaagagtttaggaaagctgttttatagaatgtcacacattagtttcattcctcatggtgaaatttgatatgggcctctccttcacatttctcgtaacatgaagttggaaatagaggcttaaacattttttaccagaacacttcatagatggtgatgtgtacttcatcttgcaatacctcagaagcagatagtatccatttcccccagtatcaccagtgccaagtttgatcacttatggtaactactggagttgtctgttataaagatccattatatacctaataggattggtcagccttgatcaatgatctttggaaatgtgtgatcatatggtatgtattttacttttttttttttttgggacaggatctctctttctgtcaccaaggctggagtgcagtggtgtgatttcggctcactgcaacctgcacctctcgggttcaagtgattctcgtgcctcagcctcccaagtagctggatacacaggtgtgcaccaccatactggctaattcttgtatttttagtagagatggggttttgccatgttggtccaggctgatcttgaactcctgcacctgcctcagcctcccaaagtgttgggattacaggtgtgagacactgcgcctggctatattttactatttggaaatcacaatgcatcttaaaattgatggcttcttgcaaccactttcaaccaggtgcctgtcatgatttagtgctagcatcaaggcaggttagttatgaagaaatagagtgtgtgtttatatactcacacagttagaaatcgacccttttaaaaattatttctttttgaaaataatgtcagttccatcagaactaatgcattgataactaaatgtctgtggttccttgtcataggtctacacctgacctctctattttgtgcacataggggattcgtaatatcactgttcagtcagtcattcaccatctagtgatcatcattctacatgattgcactttttcaaaggcataaaaagccaacagttgcactcttaataatcaactgtaacacaaagcagagtactttgggagttttaacaggatatattattggtaactggctattatgccactccctctgggtgccacatttgcctgttaaccaagaaatgtagacatggtgccttatcccaacatttctgaaattatatctcaaggaatcaccagtgcttactagtacttgacaatgaaggaggattttacagttaaagaagcttataaagtagcatctactaaatcccctcctaaggaacaagcaaaagcacctcaccagcttatcaaaagactaaagagaagtgaaaaaaaaaaaaagacggccgggcgcggtggctcatgcctgtaatcccagaactttgggaagccgaggcgggcggatcacgaggtcaggagatcaagaccatcctggctaacacggtgaaaccccgtctctactaaaaatagaaaaaattagccgggcgtggtggcgggcgcctgtggtcccagctactcggggaggctgaggcaggagaatggcgtgaacccgggaggcagagcttgcagtgagccgagattgcgccactgcactccagcctgggcgacagagcgagactccgtctcaaaaaaataaaaataaaaaaagactaaggagtattctagtgaagaaaatggttgaactttgtttaaactggtgtatggcaaacttcactgttgaaatacttattcccatgacctattatctttgtaggtgggtgaaattgcattgggaactgctgctataaccaaaagagaatttcagtcaccatgtctggttgttagctatgatggaatggcagcatcatggtctcagttatgagtgaaaatctttgttgtagctaagtagtggtgcctcctgagttttattaaatgccgtttcactatc

SEQ ID NO: 106 - protein, 679 aa, Homo sapiens
MESRSVAQAGVQWCDLGSLQAPPPGFTLFSCLSLLSSWDYSSGFSGFCASPIEESHGALISSCNSRTMTDGLVTFRDVAIDFSQEEWECLDPAQRDLYVDVMLENYSNLVSLDLESKTYETKKIFSENDIFEINFSQWEMKDKSKTLGLEASIFRNNWKCKSIFEGLKGHQEGYFSQMIISYEKIPSYRKSKSLTPHQRIHNTEKSYVCKECGKACSHGSKLVQHERTHTAEKHFECKECGKNYLSAYQLNVHQRFHTGEKPYECKECGKTFSWGSSLVKHERIHTGEKPYECKECGKAFSRGYHLTQHQKIHTGVKSYKCKECGKAFFWGSSLAKHEIIHTGEKPYKCKECGKAFSRGYQLTQHQKIHTGKKPYECKICGKAFCWGYQLTRHQIFHTGEKPYECKECGKAFNCGSSLIQHERIHTGEKPYECKECGKAFSRGYHLSQHQKIHTGEKPFECKECGKAFSWGSSLVKHERVHTGEKSHECKECGKTFCSGYQLTRHQVFHTGEKPYECKECGKAFNCGSSLVQHERIHTGEKPYECKECGKAFSRGYHLTQHQKIHTGEKPFKCKECGKAFSWGSSLVKHERVHTNEKSYECKDCGKAFGSGYQLSVHQRFHTGEKLYQRKEFGKTFTCGSKLVHERTHSNDKPYKYNECGEAFLWTTYSNEKIDTDETL

SEQ ID NO: 107 - DNA, 4336 bp, Homo sapiens
gcagtgcattcggtggtagtttggtgtcagtcctgtgtcttgtcggtccttctaaacgtgtccccttacgatgctggctcgcaaccacctggaagttgactaaggggagaaggagtctcgttggaaaacggaggcacaattctgtcttctcttgaactgcataactgagaactctgcaaattccccaaagaaggaggaaaaatgaccatgttcaaggaggcagtgaccttcaaggatgtggctgtggtcttcaccgaggaggagctggggctgctggacgtttcccagaggaagctgtatcgagatgtcatgctggagaacttcagaaacctgctatcagtggggcatcaactttcccaccgagatacttttcacttccaaagagaagaaaagttttggatcatggagacagcaacccaaagagaagggaattcaggaggcaagatccaaactgagttggagtctgttccagaaacaggaccacatgaagagtggtcttgccagcaaatctgggaacaaactgcaagtgagttaactagacctcaagactccataagtagctctcagttctccacacaaggtgatgtcccctcccaggttgacgcaggactatctataattcacataggagagacaccttctgagcatgggaagtgtaaaaaattcttcagtgatgtctccatccttgatcttcatcaacaattacactcaggaaagatatcccatacatgtaatgagtacaggaagagattctgttatagctcagctctttgtcttcatcagaaagttcacatgggagagaaacgctataagtgtgatgtgtgtagtaaggcatttagtcagaactcacaactgcaaactcatcagagaatccacactggagagaaaccattcaaatgtgagcagtgtgggaaaagtttcagccgtagatcaggaatgtatgttcattgcaaattacacacaggagaaaaacctcatatttgtgaggaatgtgggaaggccttcattcacaattcccagcttcgggaacatcaaagaatccatactggggagaagccattcaaatgttatatatgtggtaagagcttccatagtagatcaaatcttaataggcattccatggtccacatgcaagagaaatcatttagatgtgatacctgtagtaatagctttggtcagagatcagcacttaatagtcattgcatggaccacacaaaagagaaactatacaaatgtgaagaatgtggaaggagcttcacttgtaggcaagatctttgtaagcatcagatggaccatacaggagacaaaccatataattgtaatgtatgtgggaagggcttcaggtggtcctcatgtctttcaagacatcagcgggtccacaatggagaaacaacattcaagtgcgacggatgtgggaagagattttatatgaattcacagggccattcacatcagagagcctatagagaagaagaactgtataaatgtcagaagtgtgggaagggctacattagtaagtttaatcttgacttgcaccagagggtccacacgggagagagaccttataattgtaaggaatgtggaaagagcttcaggtgggcctcaggtattttgagacataagagactccatactggagaaaaaccattcaaatgtgaagagtgtgggaagaggtttactgagaattcaaaacttcgtttccatcaaagaattcacactggagaaaagccttacaaatgtgaggagtgtggaaagggattcagatgggcctcaactcatctaacccatcaaagactccacagcagagaaaaactattccaatgtgaggattgtgggaagagcagtgagcacagttcatgccttcaagaccaacaaagcgaccacagtggagaaaaaacatccaaatgtgaggactgtgggaagcgctacgagaggcgcttgaatctagatatgattttatcattatttttaaatgatatataattattgtccatatttatgggttacagcatatttcaatacatgtatacaatgtataatgatcaaatcagtgttattagcatatccatcacctcctttatcatttatttgtggatcatttatcatttctttgtgctttgaacgttcaaaaactgctgttctagttatttgaaaataagttattattaattatagtcacctttagtgctgtggaacactagaacttgttcctttcatcatcttactgtactttcatatctgttaacgaatctttcatcatccaccctctctcctacttttcccttctagtaattgctatgccatgctgcttctgcttttttttttttttttttttttttttgagaacagagtcttccaggcttgagtgtagtggcatgatcctttctcactgcagcctccacctcctgggttcaagcgattctcctgcctaaacctcctgagtagcagggattacaggcacgcaccaccacgcccagctaatttttgtacttttttttttttttttttgagacagagtatcgctctgtcgcccagtatggagtgcaatggcttgatctcggctcactgcaacctctgcctcctgggttcaaacgattcttccctgccttggcctcccgagtagctgggactacaggcgcccgccaccacacctgactaattgttgtatgcgtagtagagatggggttttgccatattggccaacctggacttgaactcctgacttcagatgatccgcccacctcggcctcccaaagtgctgggattacaggcgtgagccaccatgcccaccatgcctaaaaatttttgtatttttagtgaagatggggtttcaccacattggccaggctagccttgaactcccaaactcaaatggtccacctgccttggcctcccaaagtgctgggattacaggcatgagccaccgtgcccagccaatgctatgctgcttctatgatgtcaactttttagcttccacatatgtgtgaaaacatgtggtatttatctttctgggcctgaatttacatcactcaacatcatgttctccaaagcttatctttatcttgccataaatgacagaattttattattttttatggttaaatagtgtacctttgtgtatgtatgccacattttctttaccattttctgttgatgaacacttagattggttccatatgttagctattgcaaatagtactataataaatataggagtgcagataggagttcaacacactgatttcctttcctttggatatacagctagtagtgggattgctggatcacttgaatgctgatatgcataagaggatctacactggagaaaaaccatggaagtgtggagattgtggtacatgcttcagtcagggctcacatcttcaaattcagtgtctgttctgtagagaaaccttaataatgtgatatatgtgacagcaaagagttataagatatgaatatgttaattttagtagatacttccgaaaagtatttcaaactggttgtaccactataaactctgaccattattaggcaagaattggctttttttttttttttcttttgagacagtcttgctctgtcacccagactggcatgcagtggaatgatcacggctccctgcagccttgacctcccaggctcaagaaatccttctgcctcagcccctcaaaagctgggactataggcatgcaacaacacgcctggctaaatttttgttgtagagatggggtctcactatgttgcccaaattggtctcaaactcctgggctcaagcgattctccctcctcagccttccaaagtgctgggattacaggcctgagccatgcgcacagcattttgttttgttttgttttgtttttgagatggggtctctcggtgttgcccaggctggattgcttattcacagatgcagttacagtgccctatagcctcgaactcctgggcctaagtgatcctcttgcttcaatcccctgagaagctgggactacaggcatggaccaccacccctgattgatcttctttagtttctataacaaaatagtacactgtttccacaaacttgggaaggctagtatttgggggtggggggcgtggaaatcactaaacaacaaagaaaatctgatgaattggacagcataaaaatattggcataaagatgaacataacataagcaggaatatttaaagcacatactttttatagagtgtctcccctgtaatgtctctggttaaatgaaagggtttcaaatgtgaagacaaccctaaccatactcattatctgtaaaagatgtagcattgtcatggactccttaataaacgtgaagactttaatcca

SEQ ID NO: 108 - protein, 593 aa, Homo sapiens
MTMFKEAVTFKDVAVVFTEEELGLLDVSQRKLYRDVMLENFRNLLSVGHQLSHRDTFHFQREEKFWIMETATQREGNSGGKIQTELESVPETGPHEEWSCQQIWEQTASELTRPQDSISSSQFSTQGDVPSQVDAGLSIIHIGETPSEHGKCKKFFSDVSILDLHQQLHSGKISHTCNEYRKRFCYSSALCLHQKVHMGEKRYKCDVCSKAFSQNSQLQTHQRIHTGEKPFKCEQCGKSFSRRSGMYVHCKLHTGEKPHICEECGKAFIHNSQLREHQRIHTGEKPFKCYICGKSFHSRSNLNRHSMVHMQEKSFRCDTCSNSFGQRSALNSHCMDHTKEKLYKCEECGRSFTCRQDLCKHQMDHTGDKPYNCNVCGKGFRWSSCLSRHQRVHNGETTFKCDGCGKRFYMNSQGHSHQRAYREEELYKCQKCGKGYISKFNLDLHQRVHTGERPYNCKECGKSFRWASGILRHKRLHTGEKPFKCEECGKRFTENSKLRFHQRIHTGEKPYKCEECGKGFRWASTHLTHQRLHSREKLFQCEDCGKSSEHSSCLQDQQSDHSGEKTSKCEDCGKRYERRLNLDMILSLFLNDI

SEQ ID NO: 109 - DNA, 2797 bp, Homo sapiens
gttctgtccccggtgtgtgggtctgtgacagggtccaacagggcctggtccgtgtccggtcccccaaatctgtcgtccctgcccccaggcattggcatcaacaaaagtcagaattcccgggaacttgaacagaggctgctaaattcccagtaattgctcctttggccttctagggactgacttcaaagaaggaaggaaagaatcaggcagtgcttcctcattctcttttaaaacccgcttcccgctgagtctgcacccaggagaccagagagcaccttgcccttccatggaaactcaggctgatctcgtatctcaggaacctcaggccctgcttgacagtgctcttccttcaaaagttcctgccttttccgacaaggacagcctgggggatgagatgttggcggctgcgctcctaaaggccaagtcccaggagctggtaacctttgaggatgtagctgtgtacttcatccggaaggagtggaagcgtttggaacctgctcagagggacctctatagagatgtgatgctggagaattacgggaatgtgttctcactggatcgtgagaccaggactgaaaatgatcaagaaatttctgaagacacaagatcacatggggtcctactgggaagatttcaaaaggatatttctcagggtctcaagtttaaagaagcctatgaacgagaagtcagtctgaaaaggccgctggggaactcccctggagaaagactgaacaggaaaatgccagattttggtcaagtgacagttgaggagaagctaacccccaggggagagagaagcgagaaatataatgattttgggaacagcttcactgtgaattccaaccttatctcacatcagagactccccgtgggagacagaccccataagtgtgatgaatgtagcaagagctttaatcgaacttcagaccttattcaacatcagagaatccacactggggaaaagccctatgaatgtaatgagtgtgggaaggccttcagccagagctcacaccttattcagcatcagagaatccacactggggaaaaaccttatgaatgtagtgattgtgggaaaaccttcagctgtagctctgccctcattctgcatcggaggatccacacgggggagaaaccctatgaatgtaatgagtgtgggaagaccttcagctggagctccaccctcacccaccatcagagaatccacactggtgagaaaccctacgcctgcaatgaatgtgggaaggccttcagcaggagctcaacccttattcaccatcagagaatccacactggagaaaaaccctatgaatgtaatgaatgtgggaaagccttcagccagagctcacacctctatcagcaccagagaatccacactggagagaagccctacgaatgtatggaatgtggaggaaagtttacctacagttcaggccttattcagcatcaaagaatccacaccggggagaacccctatgaatgtagtgagtgtgggaaagccttcaggtacagctcggctcttgttcgccatcagagaattcacactggagagaagcctttgaatgggatcggcatgagcaaaagctccctcagagttacgaccgagttaaatatcagagagtccacgtgaaagagccacacacccattttcctcactttccctgagtctcaagagctcttgccttaccctataaatctcaacagcttaggatgtgtccctttcaactcagacttttcattttagagaatggggcagatggggcaaatcgttgaattttcccagaaatcacaccagccttagaaagcgtcaaggcaagtggatggcgtgctgggaatagaaagcagctctgggaccagttaccccatttaggaaaggagtttgcactaaactgtttttctcacagcagaggaacctttccaaggtggggatggaagcacagtcgggacagaattcgatggattcctttagttggagtccgcgtagtcagcacagacagcagtggaaaggacgctctgggtcctgttatttgctagggagggtaaagggagactatttcaaagctactgttcctagtccagctttaagtttcggtaagaaacatgctgttttgtttcatgatttcgttaattatggaaatttggcattgagggattattttattgagggtagaagagattccagaatcatcatctgtgatgatggtgtcctttagggctcttggagcagccagaccatgtttccaagagaaacctggtgatattgccagcagaccccctgccatcccccccagttgtcctggggctgaatgggcaaatctgtccaaacagctagtaaccggctgtgagggagagggtcagaagcacttagcgttggcctctgattgctgtcctctcttgtcctcttcccactccaatgatgaaaatgattttctctaaatgcctgggtaaggatgctttcaaggagctcacttggcctgcttgccctgccctctcacctctgacacccagccccaggagccagaccactcctgcctccacctctgactcttcagcagctgaagattaatgcagagaaagagcaaagcccaaaagggagaaaaaaaaaacaaaaaaacaaaaaaacgaagcccagagaaggcaggctgtgcctgagcctggtagcagagctcgttgctgggtgaggatggcactccccgagttttcccaaccgacgggatgaccttccattgtgttttcccaaccctgctcatcctgtagcataaatgaagtgcactattaaacagaatagtttttcagaaga

SEQ ID NO: 110 - protein, 446 aa, Homo sapiens
METQADLVSQEPQALLDSALPSKVPAFSDKDSLGDEMLAAALLKAKSQELVTFEDVAVYFIRKEWKRLEPAQRDLYRDVMLENYGNVFSLDRETRTENDQEISEDTRSHGVLLGRFQKDISQGLKFKEAYEREVSLKRPLGNSPGERLNRKMPDFGQVTVEEKLTPRGERSEKYNDFGNSFTVNSNLISHQRLPVGDRPHKCDECSKSFNRTSDLIQHQRIHTGEKPYECNECGKAFSQSSHLIQHQRIHTGEKPYECSDCGKTFSCSSALILHRRIHTGEKPYECNECGKTFSWSSTLTHHQRIHTGEKPYACNECGKAFSRSSTLIHHQRIHTGEKPYECNECGKAFSQSSHLYQHQRIHTGEKPYECMECGGKFTYSSGLIQHQRIHTGENPYECSECGKAFRYSSALVRHQRIHTGEKPLNGIGMSKSSLRVTTELNIREST

SEQ ID NO: 111 - DNA, 4056 bp, Homo sapiens
agtgaagcggaagccattactctctggagtcgattgccccgagacacatgggccaaggaggggtcagcggcgaattctttcggcctgttggggacccctcgtgtccccacgccagactggacctcccgtatgaacttctcttcgcatcggcggcggcttccgtcacctccgctcccccgatcctattcccagtcgtatgccagcttggagagtcacgtgagagcaagagagtagctttctggttgtcctggtgccctgctcaggcaaactgactgccattctctgaggatggcagctctgtcccccacatttgccacgtccacccaggattccacctgtctccaggactcagaatttcctgtttcttcaaaagaccattcctgtccccagaatttggacctgttcgtgtgcagtggtctggagcctcacacacccagtgttggttcccaggaatcggtgactttccaagatgtcgctgtggactttaccgagaaggagtggcccttgctggattcttctcagagaaaactgtacaaagatgtaatgctggagaactacagcaacctcacttcactggggtatcaggtcggcaaacccagcctcatctcacacttggagcaggaggaggagccgaggacagaggagaggggcgctcaccagggcgcttgtgcagattgggagactccatctaaaaccaagtggtcacttcttatggaagatatttttgggaaggaaacgcccagtggtgtgacgatggaaagagccggtcttggagagaagtccactgaatacgctcacttgttcgaagtctttggcatggaccctcatctcactcagccaatgggaaggcacgctggcaagaggccctatcaccgccgcgactatggggtagcgttcaagggcaggccgcacctcactcagcacatgagcatgtacgacgggagaaaaatgcatgaatgtcatcagtgccaaaaagccttcaccacgagcgcgtccctcacacggcacaggagaatccacaccggggagaagccttacgagtgcagcgactgcgggaaagccttcaacgacccttcagcccttaggagccacgcaagaactcacctcaaagagaagccctttgactgcagtcagtgtggaaatgcattccggaccctctcggccctgaaaatccacatgcgagttcacactggcgagaggccttacaagtgtgatcagtgcgggaaggcttacggccggagctgccacctcatcgcacacaagagaacgcacaccggagagaggccctacgagtgtcacgactgtgggaaagctttccagcacccctcccacctcaaagagcacgtgaggaatcacacgggggagaagccctacgcgtgcacgcagtgcggcaaagccttccgctggaagtccaactttaatttgcacaagaagaaccacatggtggagaagacctacgaatgtaaagaatgcgggaaatcctttggcgatctcgtgtcccggaggaaacacatgaggattcacatcgtcaagaaacccgtggaatgtcggcagtgcgggaagaccttccgaaaccagtccatccttaagactcacatgaactctcacactggagagaaaccatacgggtgcgatctctgcgggaaagctttcagcgcgagttcaaacctcaccgcacacaggaagatacacacgcaagagagacgctacgaatgcgccgcctgcgggaaagtcttcggtgactatttatcccggcggaggcacatgagcgttcaccttgtaaagaaacgagttgagtgtaggcagtgtggcaaggccttcaggaaccagtcaacgctgaagacgcacatgcgaagccacacgggggagaaaccgtacgaatgcgatcactgtgggaaggccttcagcataggctccaacctgaatgtgcacaggcggatccacaccggggagaagccctacgaatgccttgtctgcgggaaagccttcagcgaccactcatccctcaggagccacgtgaaaactcaccggggagagaagctctttgtgtcatccgtgtggaaaaggctccagtgagcgcgcctgctttagagacacaggatgattcagaccggaaacagacctcgtgggtgtaagaggaagcctctgtgagctcgcaccttactgggtgcaaaagaatccacggaacttgggagaagtccagttcctgtaaaaactgggaagacgaggcgttctcatcccataggaggtttgtgagaactcacgccgggggtgaaaatgtacgtctgtagcatggagaagccttcagggtacattcagctcttaacaaacacaggaggacttaatggcagcttggcatttaatgtcaaaatccaagccgtggcatttaatgtcaaaatgacttcagaccacttctagccttctgggcccatgagtaataatgagcacactagggagcatctctgtaaacacagtggctggggaaacccttcctagtctcacttgattcctcatgacggaaatcacactaaagagagaaatcagtgaagtaaggaacgtggaaggtcatgaatgggccgcaaaccacggccagctgcttgtctttgtatggcttgccagctaacaatagtggttccatctttaaggaagaagaatgtttgatggagaaaatttgtggccaatgaagtctgaaatacttcctgtcatctgcccctttccagaaaaacttggccgacccttggtctacagcacgggttctcagtcgggcgacgatttggctgtctaggcgtcatttggcaatgtctagagacatttttggtagttagaatggggggaagatactcctgacttgtaataagaagacatcagagatgctgctaagtcggctccagcacacaggagccccccacaacgaagagttagtgcccccaaacgtcactgttgctgaggttgaaaataatcatgcagtcattcctcaattactgcctgcagcaattcctccatttttatgaatcttgtgagcacttacgctaggagaaatttcttttacaaaacttttaaaatacaattagtgctgataattcctatgtggaaatgattccagccatggtcccctcacttgagcatgtgaatattctcacggagagaagccccagcgagattttccggtgaatacgggattgcacttactctttcatcacggaaacagaccccccgagagaagccccaacgagattttccggtgaatacgggactgcacgtactctctcatcatgaaaacagagccccgttcataaatttttcatctttatttttaaggttatactcctctaaataacccttaagcctcatcaagaaaggtttgtttatagtatttttactatagcttcatccttgataacgtcctaatttccttctggacaacctccttgaccaatggcatattgagatctatgtgacatgaggatatttctcagtaccactttgttactggtacctgatgcacacggattgcgaccagagcatgatgcctccatcaagtggtaatatgtttgcagcctgctgtccagccaagagtgacagatacttctagtgacttccccggtatccactctcatcttcttccaatatcaagagaatccaggttctgtcagattagtaaggtgtgctaatctaaattttaaaaaatctcttacaggttttcttgcagctggtaccatccatgtctcacagccctggccactgacagatcagcagatgtcaccacatgggcttctgagaaagctcttgaatggggatcgttcttaaacatgaattcctccctgtatgttttgttctttgctttacttttcaccttgcaaagagatccagtacctagtattggaagatccaccttaacgaccgtgcatatgaaaaccacagtctaaggaagtgactgcagaaagctcacagcgaccctggcctcccctgtggcctctttgagtgtctgcagcagccctggacttccagacttctatcacatgagaaaaaataaaactgattattggtttaagctgc

SEQ ID NO: 112 - protein, 595 aa, Homo sapiens
MAALSPTFATSTQDSTCLQDSEFPVSSKDHSCPQNLDLFVCSGLEPHTPSVGSQESVTFQDVAVDFTEKEWPLLDSSQRKLYKDVMLENYSNLTSLGYQVGKPSLISHLEQEEEPRTEERGAHQGACADWETPSKTKWSLLMEDIFGKETPSGVTMERAGLGEKSTEYAHLFEVFGMDPHLTQPMGRHAGKRPYHRRDYGVAFKGRPHLTQHMSMYDGRKMHECHQCQKAFTTSASLTRHRRIHTGEKPYECSDCGKAFNDPSALRSHARTHLKEKPFDCSQCGNAFRTLSALKIHMRVHTGERPYKCDQCGKAYGRSCHLIAHKRTHTGERPYECHDCGKAFQHPSHLKEHVRNHTGEKPYACTQCGKAFRWKSNFNLHKKNHMVEKTYECKECGKSFGDLVSRRKHMRIHIVKKPVECRQCGKTFRNQSILKTHMNSHTGEKPYGCDLCGKAFSASSNLTAHRKIHTQERRYECAACGKVFGDYLSRRRHMSVHLVKKRVECRQCGKAFRNQSTLKTHMRSHTGEKPYECDHCGKAFSIGSNLNVHRRIHTGEKPYECLVCGKAFSDHSSLRSHVKTHRGEKLFVSSVWKRLQ

SEQ ID NO: 113 - DNA, 6331 bp, Homo sapiens
ctgttttatgtgtgcttcccagtcctgtggtgctgctataccggggacgttgagtccccacagacctggaaattgcggcccctctttctcaacccagagcaaattgagacgtccgggctggagggcagttgtgcgatcttgattcacttcaacctctgctctccgggctcaagcaattctcccacctcagcctgagtctcactctgtccttcaggctgtgagtgcagtctcctgatcttggctcactgcaacctctgtctcctgggttcaagtgattcttgtgcctcagcctaccaagtagctgagatacaggattgacttctaaagactcttggtacctgaggaagaaacccagaagaggaagaggaaagcaaaggagtcggggatggctctttctcagggtctactgacattcagggatgtggccatagaattctctcaggaggagtggaaatgcctggaccctgctcagaggactctatacagagacgtgatgctggagaattataggaacctggtctccctggatatctcttccaaatgcatgatgaatacattgtcatcaacagggcaaggcaatacagaagtgatccacacagggacattgcagagacaagcaagttatcacattggagcattttgctcccaggaaattgagaaagacattcatgactttgtgtttcagtggcaagaagatgaaacaaatgaccatgaagcacccatgacagaaataaaaaagttgactagtagtacagaccgatatgatcaaaggcatgctggaaacaagcctattaaaggtcagcttgaatcaagatttcatttgcatttgcgaagacataggagaattcatactggagagaaaccttacaaatgtgaagaatgtgagaaagttttcagttgcaaatcacatcttgaaatacataggataattcatactggagagaaaccatacaaatgtaaggtttgcgacaaggcttttaagcatgattcacacctggcaaaacatactagaattcacaggggagacaaacattacacatgtaatgaatgtggcaaggtttttgatcaaaaagcaacccttgcatgtcatcatagaagtcatactggagagaaaccttataagtgtaatgagtgtggcaagacctttagtcagacatcacaccttgtgtaccatcatagactgcatactggagagaaaccttacaaatgtaatgagtgtggcaagaccttcgctcgaaattcagtcctcgtaattcataaggcagttcatactgcagagaaaccctataagtgtaatgaatgtggcaaggtttttaagcaacgagcaactcttgcaggacatcgtagagttcacactggagagaaaccttacagatgtgaagaatgcgacaaagttttcagtcgcaaatcacatcttgaaagacataggaggattcatactggagagaaaccatacaaatgtaaggtttgtgacaaggctttccggagtgattcacgtcttgcagaacatcagagagttcatactggagagagaccttacacatgtaatgaatgtggcaaggtttttagtacaaaagcgtacctcgcatgtcatcaaaaacttcatactggagagaaactttacgaatgtgaagaatgtgacaaagtttacattcgcaaatcacaccttgaaagacataggaggattcatacaggagagaaacctcacaagtgtggtgattgtggtaaagcctttaattcaccttcacaccttattaggcatcagagaatccatactggacagaaatcttacaaatgtcatcagtgtggcaaggtctttagtctgaggtcactccttgcagaacatcagaaaattccttttggagacaattgtttcaagtgcaatgagtatagcaaaccatcaagcattaattgacatcagagtcaaatcagcattgacctgagtttgagttgacttaacattgatttcaagcattaatcgacattaaactgtttatgttaagaggattgggccaggcgtggtgtctcacacctgtaatcccagcactttgagaggccaagacaggtaggtcacttgaggtcatgaatttgagaccagcctggccaacagacgggagccacttttcccagcctgtatgttcttttatttatttatttatttttaagatggaatcttgctctgtcgcccacgttggagtgcagtgatgtgatctcggttcactgcaacattcacctcccaggttcatgcaattctcctgcctcagtctcctgagtagctgggactacaggtgcgtgccaccatgcccgggtaattttttgtatttttagtagagactgggtttcaccgtgttagctaggatggtctcgatcttctgtccttaaaatccacctgcctccacctgccaaagtgctgagattacaggcgtgagccaccacacctggcctgttttttgtttctttaacaaaaagttatagaaatttctctgggtattgtgttgaatctacatcacattcagttataatcatttagcaatattattccattcaatatggcttgtatctcttatttgcacatgtttttatcactttgatcaatgtttgtagatttgaaggtagaaacttctcaacttttttcatttattcctaagtatttcttactttaagttctttagcaaatgaaagtgtttttttaattttctttttaaattgtttattgttaatgtatggaaattcaactaatttttggtgctgttattctattcttcaaatccactgcatatgttttttagttccagttgcattttggttgactctttgtgattttctacacagaagatcatgtcatctacaaagaaatagttttacttctttctttctgatttggatgagtttgatttcttttgctatttcattgctctagctaggacagccagtattgattgaatagaaggggtgagagcattcttgcatcatgtgagatcctacaggaaaagcattccattttccctgactggttatttctgctgtggtcatttcatggatggtctttgtattgttgaggtaaatttccttctctttctattttgtttaggatttccatgatgactggatgttgaattttgtgaaatgctttttctccatgtattgagatgatgtggttttcatctttcattatgttcaagtggtatatcacattgatttgcttgactatgttgaaccattttgcatcccagaaataagtggcacttgcatatcaacaatcctttttataacctcttgaatacagttcgctagtacaaggggtcttcaggaagttcatggaaaaatacatattatgagaaaattgtgcatgatatcacattttttgcaccaagataaactgatacaaatccgttataacatgtctgaacagggtttggtttgaggcactcagatgggtaagacatgagtttgaaaagagactcaatcaaggcaatgtaaattctgctaaaactgaaacaagaagaaacatcaaatttgcgatgagaccagatgctgtggctcaggcctgtaatcccataattttcagaggctgagacagttgggtcacgtgggccccggtactcaagaccagcctgggcagaatggtgaaaccaccttctctacaaaaaatacataaattagctgggcattgtggcacatgtctgctggttcagcttctgtggagtctgcagtgggaggatggcttgagcctaggagttcgaggctgcagggagccatgatcatgccattgtactccagcatgggtgacagagacagatagtgtatcgaaaaatgaatctggtaaagtttgggtagagggacaatgaaatcattgatgctttatgaaaaggttatggggacgattcccaaaataaatcaccagtttgtaaatggaaaacttattttaagttgggacaagatgatgttgaaagtgatgcacaggacaggtgtggtggctcacacctgtaatcccagcactttgggaggccgaggcaagagcatcacgaggtcaggagatcgagaaaatcctggctaacacggtgaaaccccatctctactaaaaatacaaaaaattagccaggcgtggttgtgggcgcctgtagtcccagctactcaggaggctgaggcaggagaatggcatgaaccgaggaggtggagcttgccatgagcagagatcatgctactgcactccagcctgggtgacagagcgagactccatctcaaaaaaaaaaaaaaaaaaaaaaaaaagaaagtgatgcacagagtggcaggcagaccatccacataagttttataggtacaactgtcaaagacgacactggagaagagccaagctggatctataaggaattgcatatgagatggcacacatattcatgctgtctgaagattcagtcacgttaccatatcaagctgaaaatgtcaccactatctggagagttggacatgttttattgagaatgtattttttttctctggatctgttatgaacacctttgttggcttggttcagtaataaatatgtgagacttttcatttaaaaaaagtcaaatgacttaattctgtattttaaattctgttttgtttgttttgtttttttgagatggagtcttctgaaaattttctcatcttctctaacccggttcatgacagacccttggactttactgttgtggaaaaatctatataaaacagtatcagtgtgtcaaagcattatggctgtcacaagcttgtgaaaggaaaataaaaattactaagccaaagagaaaagtcaatctgggaactgcgtcagacaaacctgccttccattttattcctaaacaagatagttacaaagattttttaaaaagctacatatgcccctcccaaaccgggaacctcaagatctccaccctaaaatagttctgttgaatttcaccctggcgatgtaaactgagagcttatcttcacagatgtgggaaagagcccatccctctgcacacctgagtcaaatgtctatctgattgcttcccttgccctatttatgtaaaaatacagggtccctgagccagcctaaggcataagtgacttatccctcctccctgctcacatataaattgtgtatttagtgaaaggctgatcaaagattcaaagaatgttatttgttatctacctgtgacccagaaggtccccaattccagttattccacctttccagaccggaccaatgtatatatgtactgattgctgtctcgtgtgtctgtaaaatgtgtgaaaccaaactgcagcctcaacaccatggacacacgtcatcaggacctcctgaggttcgtgttaattggccttagactctccctgtccccagacccaggacgcatgtgtttcctttttcttcatttctattaaagatgggtctcattctgttggccaggcatgagagcggtgacaggatcagccctcactgaagcttcaatctcctgggttcaagggatcctcccacctcagcctccaaagttgctaggaccatagccaggtgccaccgcaccgggcaaatttttgtgttcctagtagagatgggctttcaccatgttgcccgagctggtcttgaattccagggctcaagcgatccagccgtattggcctcccaaggtgctgggattacagccatgagccaccatgaccaacgtgtttcttaatttaaaaaaaaaaaaatagaccaggtgctctggctcatgcctgtaatcccagcactttgggaggccaaggtgggcagatcacctgagatcaagtatttgagaacagcctggctaacatggcgaatcctcgttttgaccaaaatatagaaattagcctggtgtggtggcgagtgcctgtaatcccagctattcaggagggtgaggcagaagaatggcttgaattcgggaggcggaggttgcagtgagctgagatcctgcaactgcactctggctgggcaagagcgagactccatctctaaaataaaattaaagtaatataaaaaactgcttctcatgaaagctttggtataatcttacgaggtaacatcattgttttgcaactacggtatgtgttcaaaatgttcttctttgaccccacatttcattagatatatttttaagccattttaaaattgtttttctctgaaatttattgtgtttagtttacattgaggactgcatgctttctagtctgtatcatacattggaaacattttctagtacctgataaatgattttaggttgtttcgatgtgtacttgataaagatatcaaggaactttttctttatgctaacattaaaatttagttgaagta

SEQ ID NO: 114 - protein, 509 aa, Homo sapiens
MALSQGLLTFRDVAIEFSQEEWKCLDPAQRTLYRDVMLENYRNLVSLDISSKCMMNTLSSTGQGNTEVIHTGTLQRQASYHIGAFCSQEIEKDIHDFVFQWQEDETNDHEAPMTEIKKLTSSTDRYDQRHAGNKPIKGQLESRFHLHLRRHRRIHTGEKPYKCEECEKVFSCKSHLEIHRIIHTGEKPYKCKVCDKAFKHDSHLAKHTRIHRGDKHYTCNECGKVFDQKATLACHHRSHTGEKPYKCNECGKTFSQTSHLVYHHRLHTGEKPYKCNECGKTFARNSVLVIHKAVHTAEKPYKCNECGKVFKQRATLAGHRRVHTGEKPYRCEECDKVFSRKSHLERHRRIHTGEKPYKCKVCDKAFRSDSRLAEHQRVHTGERPYTCNECGKVFSTKAYLACHQKLHTGEKLYECEECDKVYIRKSHLERHRRIHTGEKPHKCGDCGKAFNSPSHLIRHQRIHTGQKSYKCHQCGKVFSLRSLLAEHQKIPFGDNCFKCNEYSKPSSIN

SEQ ID NO: 115 - DNA, 2978 bp, Homo sapiens
gtcacttggctgctcgcgtcaggccacaccggtggtctgggctgtggcgcgcgggtcggggcccgaggcgggcggccaggaaggacctgatgaccttcgaggatgtggccgtgtacttctcccaggaggagtgggggctcctggacacagcgcagagggccctgtaccgccacgtgatgctggaaaacttcacacttgtgacctcacttggactctctacctcccgacctcgtgtggtcattcaacttgagcgtggcgaggagccctgggttcccagtggaaaggacatgaccctggccaggaacacctacgggaggctcaactctggttcctggagtttgacagaggatagagatgtttctggagaatggccacgagctttcccagataccccacctgggatgactactagcgtcttcccagttgccgatgcctgccacagtgtaaaaagcctgcagcgacaaccgggtgcctccccatctcaggagagaaaacccacgggggtgtcggtgatctactgggagaggctcctgctaggctcgcgcagtgaccaggccagcatcagcctgcgactgacctccccactcaggccccccaagagcagccggcccagggaaaagaccttcacagagtaccgggtgcctgggaggcagcccaggacgcctgagcggcagaagccatgtgcacaggaggtccctgggagagccttcgggaatgcctcggacctgaaggccgccagtggtggcagggatcgcagaatgggcgcagcttggcaggagcctcatagactcctcggtggccaggagccctcgacctgggacgagctgggcgaggctcttcacgctggggagaagtccttcgaatgcagggcgtgcagcaaagtgttcgtgaagagctccgacctcctcaagcacctacgcacccacaccggggagcggccctacgagtgcacccagtgcggcaaggccttcagccagacgtcgcacttgacgcagcaccagcgcatccacagcggcgagacgccctacgcgtgccccgtgtgcggcaaggccttccggcatagctcctcgctggtgcggcaccagcgcatccacacggccgagaagtccttccgctgctccgagtgcggcaaggccttcagccacggctccaacctcagccagcaccgcaagatccacgcgggtgggcgtccttatgcttgcgcacagtgtggccgccgcttctgccgcaactcgcacctgatccagcacgagcgtacgcacacaggcgagaagcccttcgtatgcgcgctctgcggtgctgccttcagccagggctcctcgctctttttgcaccagcgcgtgcacacaggcgagaagcccttcgcctgcgcccagtgcggccgctcctttagccgcagctccaacctcacccagcaccagctcctgcacacgggcgagcggcccttccgctgcgtggactgtggcaagggtttcgccaagggcgccgtgctgctcagccaccggcgcattcacacgggcgagaagcccttcgtgtgcacgcagtgtggccgcgccttccgtgagcgccctgccctcttgcaccaccagaggatccacaccacagagaagaccaatgccgcagcaccagactgcaccccggggccaggtttccttcagggacatcatcggaaggtgcgccggggagggaagccaagcccagtcctgaagccagcgaaggtctgaggtcacaggtcgcagcccaaccctttcttggccttctgtgaatcccttccacagctaaagggtccgagtgctcttcagatccacgatggggaaaagctctgtgcctgagagtcagggacgagggagaccctttggctgtggttccatttgcaggtggggacaggatttgccagtttagtcatagctcacacctccatcctcaaagaggtaacactgcagaaacatcagagggaggacatgtcagctggaactctggtggggctgaggctgtagttggggccataggacgccgacaaaggcagcgctgcatggtggtgctacttcatgtgttatgagagtggatgctgaggtgagggggatgcggacatggggtaggatgacctagagaaacttatgatgtctgcacacaaactggccgctagacggacgctgaggacattttccccctgaggcctctattcaaggcttcctgggggccatctcagcaaacaggagactacaggggactggggatcagggtgtggcctgtgagtgtcagcctcctcctcggaaaaagaaaagctttgggtcaactcagcatcatgtttgcagatgctgacagacgggatcctaatgagagtcaatgtgtgctcactgccagctcctgggctgtgctctggtcagccaggtgtgagggcctggcctggggtcacacagctgactcaggagaggaatgcccatggttctcagcattggaaggacaaacctaggatgatggctttccagtggcactcgttcaggttttcgtccaagtctcagcttggccaaggcctgtcgctcactcatttacaaaagtcgatgtgaggaggagcctttacacctgtggagacagtgatagctttggagcagataaggtggagctgctcatttttgctggatttggtggccgatccccgcccccacccccaccccctccatctcacctttcccttgttatgcctcctcaattggaggctggacagagagctgaataggaaggacttgccattacctaaggccatgtgtgacagcctcctgaggacctccccaacccagtgtgatgggcctgcatggcagagacaaaagggtagactgggggtcatttgcttcctgtggccttaagcctactaggccccatccttacctgagacctcacctccaagaaattaatggtcttttcaatggagaaaaaaaaagactagtatttgcaacttcaaatagatgtagtttccttta

SEQ ID NO: 116 - protein, 544 aa, Homo sapiens
MTFEDVAVYFSQEEWGLLDTAQRALYRHVMLENFTLVTSLGLSTSRPRVVIQLERGEEPWVPSGKDMTLARNTYGRLNSGSWSLTEDRDVSGEWPRAFPDTPPGMTTSVFPVADACHSVKSLQRQPGASPSQERKPTGVSVIYWERLLLGSRSDQASISLRLTSPLRPPKSSRPREKTFTEYRVPGRQPRTPERQKPCAQEVPGRAFGNASDLKAASGGRDRRMGAAWQEPHRLLGGQEPSTWDELGEALHAGEKSFECRACSKVFVKSSDLLKHLRTHTGERPYECTQCGKAFSQTSHLTQHQRIHSGETPYACPVCGKAFRHSSSLVRHQRIHTAEKSFRCSECGKAFSHGSNLSQHRKIHAGGRPYACAQCGRRFCRNSHLIQHERTHTGEKPFVCALCGAAFSQGSSLFLHQRVHTGEKPFACAQCGRSFSRSSNLTQHQLLHTGERPFRCVDCGKGFAKGAVLLSHRRIHTGEKPFVCTQCGRAFRERPALLHHQRIHTTEKTNAAAPDCTPGPGFLQGHHRKVRRGGKPSPVLKPAKV

SEQ ID NO: 117 - DNA, 4237 bp, Homo sapiens
gcagagcgttccagatccctgggcgtcagcgagccgtgagatgcgtggtccaccatcggtgacctcaccgcctcggttcgccctcagccgccccgattggccatctgcaagcttcccttctccgtggagagcaggaagacagtcatgggacctcagggagccaggagacaggctttcttggcatttggggatgtcactgtggatttcacccagaaggaatggaggctgctgagccctgctcagagggccctgtacagggaggtgacactggagaactacagccacctggtctcactaggaattctccattctaaaccagaactcatcaggcggctagagcaaggggaagtgccctggggagaagagagaagacgccggccaggcccctgtgcaggaatatatgcagaacatgtcctgcggcccaagaatcttggacttgcacatcagaggcaacagcaactacaattttctgatcaaagcttccagagtgacacagctgaaggtcaagagaaagaaaaaagcactaagcccatggcattttccagcccacccctaagacatgcagtaagctcaaggaggaggaacagtgtagtggaaatagagtctagtcaaggccagagggaaaatcctacagaaatagacaaagtattgaaaggaatagaaaattcaagatggggagcattcaagtgtgcagagcgtgggcaagacttcagccggaagatgatggtaatcatacacaaaaaagcacattccaggcagaaactttttacatgcagggagtgtcaccagggctttagagatgagtcagcattgctcttgcaccagaacacacacacaggagagaagtcctatgtgtgcagtgtgtgtgggcgaggcttcagcctcaaggccaacctcctcagacaccagaggacacactcaggagagaagccttttctgtgcaaggtgtgtggacgaggctataccagtaagtcatacctcactgtgcatgagagaacacacacaggagagaagccttatgaatgccaggagtgtgggcgaaggtttaacgataagtcctcatacaacaagcacttgaaggcgcattcaggggagaagccttttgtgtgcaaggagtgtgggcgaggctatactaataagtcatacttcgttgtgcacaagagaatacactcaggagagaagccttacagatgccaggagtgtggccgaggctttagcaataagtcacaccttatcacacaccagaggacacactcaggggagaagccctttgcgtgcaggcagtgtaagcaaagttttagcgtgaaaggaagtctcctcagacaccagagaacacactcaggggagaagccttttgtgtgcaaggattgtgagcgaagctttagccaaaagtcaactcttgtctaccaccagagaacacactcaggggagaaaccttttgtttgtagagaatgtgggcaaggatttattcagaagtcaacccttgtgaaacatcagatcacacactcagaggagaagccttttgtgtgcaaggactgtggacgaggctttatccaaaagtcaaccttcactttacaccagaggacacactcagaggagaagccttatggatgtcgggagtgtgggcgaaggtttcgggataagtcctcctataacaagcacctgagggcacacttgggtgagaaacgttttttctgcagggattgtgggcgaggctttaccttgaagccaaatctcaccatacatcagaggacacactcaggagagaagcccttcatgtgcaagcagtgtgagaaaagttttagtttgaaggcaaatcttcttagacatcagtggacacactcgggggaaaggccatttaattgcaaggattgcgggcgaggcttcatcctaaaatcaactctcctcttccaccagaagacacactcaggggagaagcctttcatctgtagtgaatgtgggcaaggatttatctggaagtcaaatcttgtgaaacaccagcttgcacattctggcaagcagccttttgtatgcaaggagtgtgggcgaggcttcaactggaagggaaatctcctcacacaccagaggacacactcaggggagaagcccttcgtgtgtaatgtgtgtgggcaaggcttcagctggaagagaagtctcaccagacaccactggcggatacactcaaaggagaagccttttgtttgccaggagtgtaagcgaggctataccagtaagtcagacctcactgtgcatgaaagaatacacacaggagagaggccttatgaatgccaagagtgtggacgaaagtttagcaataagtcatactacagtaagcacttaaagagacacttacgtgagaagcgtttttgtacagggagtgtgggtgaggcttcatcttgaagttatatctcaccatccatcagaggacacactcaggagagtaactttgctttgttacaagctttagttgaggctgcataacttgttcgtgaagatataacagaggcagacagaatccagagggctacagagaacctgaattcaacccatgtgtccccaagagattcagagaaaagaggtcaatgtttagggaacagagatgccagttgaggggagggcattacctgggctattggggaaatgtggtctctttcctactgagcacatattcttgttgtatttgtgccaggctgtgctttctaaggactgctcttagccagtgactgcagagcagggataccaaggcaggcctgttacactctccccaacctccttggactgcaaacaatctaggacacctccaccaaacctcctcttgcactttccctctggcttccctcccagccttccttggtttggatgttttgtcccctccttaatttatgttgaaactctacataaactgtttactgttgaaacagtgtaagtattaggaggtgggacctttgggaagtgattaagtcaagtcacgaagatagagctttgcgaatgggatcaggtgcccttatgaaaaggcttgatagagggagtttgtcctgtggcccttctattttctgctctgtgaggacacaatgctcctcccttccaaaagatgcagcatgaaggcatcatcttggaaacagacatgagccctcaacagacaactgcacctactgatgttttgatgttgaacttcccagcctccagaactctgggaaaataaagtcctctttatacatttcctagtcagtggtattttattataacagctcaaatagactaagtaactgctcccctcatcattctctcacagtcatatctggaaataaaatctctgtatatgcagtcccatattggtctttgcagagaactccctccaacacagctgataccaagaacagtctgacaaaacaagtggtaaaatagggatctggggaccactcacctgcctggcaggagtaaagcatgttggctggtggggcacaggtaggtggttagctgcaaaatatttcacaggtgatttcctgagaaaatgcctcaatgatagagaatgctgtggcagatgtgatgatgcaggcctttgaaaatgtagggaaagtgcctacaaagagcagagtagactgattatcgccgatctgcattaccacctgcagaaggaccttgagaaattgaagacttcattcagccattagcaaacagttaatggttaagtaaaccaggactccctggtgagtgcttacaaggcctttatcttcttggatagaaggcagaattattgcccaaatatgtgggctgaaggcctgtagcagagctctacagatgttggaatgctcagccaatgcatgtctattttgtagaggtcagacccttcgtaaggaaaatctgggatcctgaaaaatgacaccggaacatctccatggatgcccaagattgcctctgccatgctcccagccacagaccatctgggtgtgtagagatggcccatccttccttaggaatagcatttccaccattcattaccacagaaccttcacaattaaggccagcttaatgagcatgtgccctacatagctgcacacaacccttgtccagcacagggaagatacatgcaatatgcctatccttttgtaaatggtatttgtgatgcttgcccttcaacttccataactttcctcatactcattttgagtttcactgcacattgtgggttcaccagaattctgtgctcctcttccatattaaacacatttacatctga

SEQ ID NO: 118 - protein, 751 aa, Homo sapiens
MGPQGARRQAFLAFGDVTVDFTQKEWRLLSPAQRALYREVTLENYSHLVSLGILHSKPELIRRLEQGEVPWGEERRRRPGPCAGIYAEHVLRPKNLGLAHQRQQQLQFSDQSFQSDTAEGQEKEKSTKPMAFSSPPLRHAVSSRRRNSVVEIESSQGQRENPTEIDKVLKGIENSRWGAFKCAERGQDFSRKMMVIIHKKAHSRQKLFTCRECHQGFRDESALLLHQNTHTGEKSYVCSVCGRGFSLKANLLRHQRTHSGEKPFLCKVCGRGYTSKSYLTVHERTHTGEKPYECQECGRRFNDKSSYNKHLKAHSGEKPFVCKECGRGYTNKSYFVVHKRIHSGEKPYRCQECGRGFSNKSHLITHQRTHSGEKPFACRQCKQSFSVKGSLLRHQRTHSGEKPFVCKDCERSFSQKSTLVYHQRTHSGEKPFVCRECGQGFIQKSTLVKHQITHSEEKPFVCKDCGRGFIQKSTFTLHQRTHSEEKPYGCRECGRRFRDKSSYNKHLRAHLGEKRFFCRDCGRGFTLKPNLTIHQRTHSGEKPFMCKQCEKSFSLKANLLRHQWTHSGERPFNCKDCGRGFILKSTLLFHQKTHSGEKPFICSECGQGFIWKSNLVKHQLAHSGKQPFVCKECGRGFNWKGNLLTHQRTHSGEKPFVCNVCGQGFSWKRSLTRHHWRIHSKEKPFVCQECKRGYTSKSDLTVHERIHTGERPYECQECGRKFSNKSYYSKHLKRHLREKRFCTGSVGEASS

SEQ ID NO: 119 - DNA, 3415 bp, Homo sapiens
ggtcggtggccgagatcccgggcacgctggctctggtccaccttctccaatccctgcctgctgggagaggacgatctcttgagaaaggaaagacttctgtgctcccgagaacttcctatcaggtcctggctgcagggaaacaagctgggctttttataattaaggttggaagaagtcaccacaggcagcagaactccatcttgagatgaaataacatctacctggacctctggcagaatttcaaggcacacactgggctgactctggcgccatgatgttgccttatccttcagcactgggagatcaatactgggaagagattttgcttccaaagaatggggaaaatgtagagactatgaagaaattgacccaaaatcataaagcgaaaggcttgccttctaatgatactgactgcccccagaaaaaggagggaaaggcccaaatagtggtaccagttacattcagggatgtgactgtgatcttcacagaagcagaatggaagagactgagtccagagcagaggaatctatacaaagaagtgatgctggagaattacaggaatcttctctcattggcagaaccaaagccagaaatctacacttgttcctcctgccttctggccttctcctgtcagcagttcctcagtcaacatgtacttcagatcttcctgggcttatgtgcagaaaatcacttccatccagggaattctagcccagggcattggaaacagcaggggcagcagtattcccatgtaagctgttggtttgaaaatgcagaaggtcaggagagaggaggtggctccaaaccctggtctgcaaggacagaggagagagaaacctcaagggcattccccagcccactccaaagacagtcagcaagtcctagaaaaggcaacatggtggtagaaacagagcccagctcagcccaaagaccaaaccctgtgcagctagacaaaggcttgaaggaattagaaaccttgagatttggagcaatcaactgtagagagtatgaaccggaccataacctggaatcaaactttattacaaacccgaggaccctcttagggaagaagccctacatttgcagtgattgtgggcgaagctttaaagatagatcaaccctcatcagacaccatcgtatacactcgatggagaagccttatgtgtgcagtgagtgcgggcgaggttttagccagaagtccaacctcagcagacaccagagaacacattcagaagagaagccttatttgtgcagggagtgtgggcaaagctttagaagtaagtccatcctcaatagacatcagtggactcactcagaggagaagccctatgtttgcagcgagtgtgggcgaggctttagcgagaagtcatccttcatcagacaccagaggacacactccggtgagaaaccctatgtgtgcctggagtgtggacgaagcttttgtgataagtcaaccctcagaaaacaccagaggatacactcaggggagaagccttatgtttgcagggagtgtgggcgaggctttagccagaactcagatctcatcaaacaccagaggacacacttggatgagaagccttatgtttgcagggagtgtgggcgaggcttttgtgacaagtcaaccctcatcatacacgagcggacgcactctggagagaagccttatgtgtgtggtgagtgtggccgaggctttagtcggaaatcactcctccttgtccaccagaggacacactcaggggagaagcattatgtctgcagggagtgtaggcgaggttttagccagaagtcaaatctcatcagacaccagaggacgcactcaaatgagaagccttatatttgcagggaatgtgggcgaggcttttgtgacaagtcaaccctcattgtacatgagaggacacactcaggagagaagccttacgtgtgcagtgagtgtggccgaggctttagccggaaatcactcctccttgtccaccagaggacacactcaggggagaagcattatgtttgtagggagtgtgggcgaggctttagtcataagtcaaatctcatcagacaccagaggacacactgacgggagaaacctgtgtatgcaggggtcatgaacaagacctgagtgaccagtcaagcctcatgttaccccagagagacacatggggagtagaccctgtgtacacagattgtgagtgaagttccagagatgtgtcagcccttatcaggcatgggagggacacgttcaggagaggagccttatgagtatagagtacgggcaactgtagccatcagtcagccttgagcatgcacaaaaggacacacttaggagagaagtttatgtgtagggactgtgggaaggctttagcaataatcaacatttaccagacatccaatgacagcctcaggggaaagcacccttgtctggggagtgttggggagcatcagtaaaagaatggacactcaggcacagagtggccctcaggaaggaggtctttgtttgtaggatgtatgggcaaagcttttgtgatcacacaccacagggagaatctgcatgtggggacactgtggagctctgcccagatgaccttttcaggggtaacaccccagctgcttgagagaacagtgttgctgctggcagagatgcattccagagatgcactccgctctggaactcactctcagccacagggagctgcatgcaccacaggggcaatgcacctttgcaggggtaccttctggccccaacccttgactcaacggggacaactccagaaggtcattccagatccagagatccccatcgaactgaaggatcactgggttgcagacacattgcaggtcagcttcttcctctgcccagtcctgccctcactccccagtgaatcctcaattttctgtctcgttgtctgtccagataattgattctaagacatgttaggtatataaggagtgtagataaggcttcagccatgagtcaccccgcagtaagccccagagtatattgaatagaaattctgcatgtgtggggagaatggacaaggacttaggaaaaagtcctcatcaaagaacagcttttttgggacaagctttacatgggtggggagggaaaatgtgaaacacattagcaataagttaaacctcatcttgtactaaaggaggacacactcagggagaagacctctgtgggcagggcttgtgggtggagcttcatcccgatgtcactcctcaactgacttaggaggacagtcttgctaccccaagtcactacctcactcacctctgagggattttcaggaaatgtcttgactcccccatgtactctgtatgtgagcgaagatggcagtaactgttaaataagcattcttttctacttcttggaatcagatgaaataaaaaagcaggctttatttaagtaatcaaaaaa

SEQ ID NO: 120 - protein, 599 aa, Homo sapiens
MMLPYPSALGDQYWEEILLPKNGENVETMKKLTQNHKAKGLPSNDTDCPQKKEGKAQIVVPVTFRDVTVIFTEAEWKRLSPEQRNLYKEVMLENYRNLLSLAEPKPEIYTCSSCLLAFSCQQFLSQHVLQIFLGLCAENHFHPGNSSPGHWKQQGQQYSHVSCWFENAEGQERGGGSKPWSARTEERETSRAFPSPLQRQSASPRKGNMVVETEPSSAQRPNPVQLDKGLKELETLRFGAINCREYEPDHNLESNFITNPRTLLGKKPYICSDCGRSFKDRSTLIRHHRIHSMEKPYVCSECGRGFSQKSNLSRHQRTHSEEKPYLCRECGQSFRSKSILNRHQWTHSEEKPYVCSECGRGFSEKSSFIRHQRTHSGEKPYVCLECGRSFCDKSTLRKHQRIHSGEKPYVCRECGRGFSQNSDLIKHQRTHLDEKPYVCRECGRGFCDKSTLIIHERTHSGEKPYVCGECGRGFSRKSLLLVHQRTHSGEKHYVCRECRRGFSQKSNLIRHQRTHSNEKPYICRECGRGFCDKSTLIVHERTHSGEKPYVCSECGRGFSRKSLLLVHQRTHSGEKHYVCRECGRGFSHKSNLIRHQRTH

SEQ ID NO: 121 - DNA, 2521 bp, Homo sapiens
agacgccgtcggggcggagccgggtcgcgaggctgcatcccggccggcggttccggagcctcgcggctggggaggcgcggcccgggacgctcgagcttagggagatctgccttctggagactgcgccgtcctcccgggagagccagaaagaggacatggctgctgggcagcgggaagcgaggccccaggtgtcactgacgtttgaggatgtggctgtgctgtttacccgagatgagtggagaaagctggccccttctcagagaaacttgtaccgggatgtgatgctggagaactataggaacctggtctcactggggctcccatttaccaaaccaaaagtgatctccctgttgcagcaaggagaagatccctgggaggtggagaaagacggttctggcgtctcctctctaggatcgaagagcagtcataaaaccacaaagtcaacgcaaacacaagactcttcatttcagggactgatactgaaaagatccaacaggaatgtaccttgggatttgaaattagaaaagccttacatatatgaaggcagattagagaaaaagcaggataaaaagggaagttttcagatagtttcagccacccacaaaaaaatccccactatagaaagaagccataaaaatactgaattgagccaaaacttcagcccaaagtcagtgcttattaggcaacagatacttcccagagaaaaaacaccaccaaaatgtgaaatacaaggaaacagcctcaaacagaattcacaattacttaatcaaccaaaaattacagcagataaacgctataaatgtagtctgtgtgaaaaaaccttcattaacacttcatcccttcgtaaacatgagaaaaaccatagtggagagaaactatttaagtgtaaagaatgttcaaaagcctttagccaaagttcagctcttattcaacatcaaataacgcatactggagagaaaccctacatatgtaaagaatgtgggaaagcctttactctcagtacatccctttataaacatctaagaacccatactgtggagaaatcctacagatgtaaagaatgtggtaaatccttcagccgaaggtcaggcctttttatacatcaaaaaattcatgctgaagaaaacccttgtaagtataatccgggtaggaaggcatctagttgcagcacatccctttctggatgtcaaagaattcattctagaaagaagtcctacttatgtaatgaatgtggcaacacctttaagtctagctcatcccttcgttatcatcagagaattcacactggagagaagccttttaaatgtagtgaatgtgggagagccttcagccagagtgcctctcttattcaacatgaaagaattcacaccggagaaaagccctatagatgcaatgaatgtgggaaaggctttacttctatttcacgacttaatagacaccgaatcattcatactggagagaagttttataattgtaatgaatgtggtaaagccttaagctcccactcaacacttattattcacgagcgaattcatactggagaaaaaccatgtaaatgtaaagtatgtggaaaagccttcagacagagttcagctctcattcaacatcagagaatgcatactggagaaagaccctataaatgtaacgagtgtgggaaaacattcaggtgtaactcatcacttagtaatcaccagagaattcatactggagagaaaccatatcgatgtgaggaatgtgggatatcttttggccaaagttcagctcttattcagcatcgaaggattcatacaggagaaaaaccctttaaatgtaatacatgtggaaaaacttttagacaaagctcatcacgtattgcacatcagagaattcatactggagagaaaccctatgaatgtaatacatgtgggaaacttttcaaccataggtcatcccttactaatcattataaaattcatatcgaagaggacccctagaaagtagatttgtatgtgtgaaagccttaaaccaaagctcatcgaagaatacatccttgagagagatgtaataaatgtaatggatgtgaaaaaaactgtaataatttagccctcattaggtatttaattccatggataaacctcagctatataatagatatgaggaaagtgtttgtgcctgtcagacacttaaaaaaataacctgagatgaagaatttacaattgaagacattgactttagccatttgtgaaatgggtttgctttttcccttttcctacagacgtatatgctagatgtcacgtgatcatcagaaacagatatccgagtgggtggggaggtgtgctttagatttctcattagaagaccaccaaactggtaatatttttatagcattttaatagcttgatcaaattgtacctttttagagaaaaggaccaaaataaaagaaaaatgaattatgaactacctctcagtctctggggtttgtccttttcctaccctgatgtcaaacttatgcatggatttcattaaaaaagaaaaagaaaaa

SEQ ID NO: 122 - protein, 605 aa, Homo sapiens
MAAGQREARPQVSLTFEDVAVLFTRDEWRKLAPSQRNLYRDVMLENYRNLVSLGLPFTKPKVISLLQQGEDPWEVEKDGSGVSSLGSKSSHKTTKSTQTQDSSFQGLILKRSNRNVPWDLKLEKPYIYEGRLEKKQDKKGSFQIVSATHKKIPTIERSHKNTELSQNFSPKSVLIRQQILPREKTPPKCEIQGNSLKQNSQLLNQPKITADKRYKCSLCEKTFINTSSLRKHEKNHSGEKLFKCKECSKAFSQSSALIQHQITHTGEKPYICKECGKAFTLSTSLYKHLRTHTVEKSYRCKECGKSFSRRSGLFIHQKIHAEENPCKYNPGRKASSCSTSLSGCQRIHSRKKSYLCNECGNTFKSSSSLRYHQRIHTGEKPFKCSECGRAFSQSASLIQHERIHTGEKPYRCNECGKGFTSISRLNRHRIIHTGEKFYNCNECGKALSSHSTLIIHERIHTGEKPCKCKVCGKAFRQSSALIQHQRMHTGERPYKCNECGKTFRCNSSLSNHQRIHTGEKPYRCEECGISFGQSSALIQHRRIHTGEKPFKCNTCGKTFRQSSSRIAHQRIHTGEKPYECNTCGKLFNHRSSLTNHYKIHIEEDP

SEQ ID NO: 123 - DNA, 3742 bp, Homo sapiens
ggtattcactttcgcgactcaggtgaactaacctgcgagaagctggttgtgcgctgaggcgaccagcgccggaaggcacggtggcgactcacgctgttctcgccgctcagaggcgggtctgaggctcggtggcggcgcccagggtggcccgggccctttcctcggtcattgtctcccctccagctctactcacaggctccgatggcggcggccgccctgagggaccccgctcaggttcctgtggctgcagacttgcttacagaccatgaggagggctatgtgacctttgaggatgtggctgtctacttctcccaggaggaatggagattgcttgatgacgctcagaggctcctctaccgcaatgtgatgctggagaactttacacttctggcctctctgggacttgcatcttccaagacccatgaaataacccagctggagtcatgggaggagcccttcatgcctgcttgggaagttgtgacttcagccataccgagaggttgttggcatggagccgaggctgaggaggctcctgagcagattgcttctgtaggactgctcagttcaaacattcagcaacaccagaagcagcactgtggagagaaacccttaaaaagacaagagggcagggtcccagttttgaggagttgcaaagttcacctatcagagaagtccttgcaaagcagggaggttgggaaggccctcctgatcagctcaggtgttctcaagcaccaggtgactcacacaggagagaagtcacataggagctccaaaagtagggaggcctttcatgctggaaaaaggcattacaaatgcagtgaatgtgggaaagcctttggtcagaaatatttacttgttcagcaccagagactacatgctgggaaaaagacgtatgaatgcagtgaatgtgggaagttatttagagatatgtccaacctttttatacaccaaatagttcacactggagaaaggccttacgggtgtagtaactgtggaaaatcctttagccgtaatgctcacctcattgaacaccagagagttcacactggagaaaagccttttacatgcagtgaatgtggaaaagctttcaggcataattccacacttgttcagcatcacaaaatccacactggagtaaggccttatgagtgcagtgaatgtggaaaattgtttagtttcaactccagcctcatgaaacatcagagaattcacactggagaaagaccttataagtgcagtgaatgtggaaaattctatagccacaagtccaaccttatcaaacattggcgtgttcatactggagaaaggccttacaagtgcagcgactgtgggaaattttttacccaatgctcaagcctcatgcaacatcaaaaagttcacactggagaaaagccttttaagtgcaatgaatgtgggagattctttagagagaattccaccctagttagacatcagagggttcacactggagcaaagccttatgagtgcagggaatgtgggaaattttttagccaaagctcaaccctcatgcaacatcgaaaagttcacattggagaaaagccttttaagtgcaatgaatgtgggagattgtttagagagaattccagccttgttaaacatcagagggttcacactggagcaaagccttatgagtgcagggaatgtgggaagttttttcgccacaactccagtctttttaaacatcgaaggattcacactggagaaatgcagtgattgtgtgaaatcctttagccagcgtttcaacctcattcaacaccagaaagttcacagtggaaaaaatcttgaaggtaacagatggaaatccgttagccacacctccagtctcattcaacactggacagtttacaatgtggacaatgtagtgaatatggaaaaaggtttcagccaaaggcctaaccctattcaacaccagaaagtttacactggagaaaggccttagggtgacaggttatgtactgtctctgaatcaatatgacctcacttaaaacagaaactctgaggatggcctttatgagggagctggcaattgaacatcattcatctaaatatgcacactggaggcaagatgagaattcctgacagattgtccttcctgagaagacagccctctgccttggagctccagagagagggagccctgtattcttggctgtacccgtcgaatggagttttgatctcgctgagtttggagttgggggaggaaaggagtggtcttggttcaaatgtgactcacttttgctgttcttgtgaatgttagatcttctttaataaatatttatttcccatacacccttatgaccatttccagagactgaattgtgtttttataattttcacccttttggctgtgtaacaggtctgcaaagctcctcattcagttattctgtaagttgatccaaatgtttcaaattttaagaacttgccaaattgtgttctaaatggttagcatttcatatttcctcctggaatatattagattttccatttcttcacattactgacagtttatatgtgtagaagtcataggccattcattttagccatgttactaagtgtgaagtagtatttcattgtagttcttaatttgtatttttccgatgactcagttttgagcattttttaatgtgtttacttgtcacccatatatcttctttagtcaaatgtattttttgcctgttttttaaaacatttggttggttacaagttcttaatatttctggagacaaattccttatttgatataagcattgtcaatattttctcatggtccatggcttttgttttcttttcttttttaaaatttagagatgaggtcgtgctatgttgcacagactagtctctaactcctggcctcaagtgatcatcctgcctcagcctcccaaagtgctgggattacaggcatgagccaccatgcttggccttgttttcagttcttaacagtatctttcctagagcagattgtcttaattttatggagcccaatttatccatttgttattttattcattgtgcatttggtgttgcatcctcttactataccatatctttgcctataaataaaagccttgactgagtgcggtggctcacgcctgtaatcccaacactttgggaggccaaggcgggtggatcacgaggtcaggagattgagaccatcctggctaacacagtgaaactccctctcaactaaaaatacaaaaaattagctgggcgtggtggcggctgcctgtagttccagctatcctggaggctgaggcaggagaatggtgtgagcccgggaggcggagcttgcagtgagccgagattgcgccactgcactccagcctggggcacaaagccagactctgtctcaaaaaaaaaaaaaaaaaaaaaaaaaaaaaaaaaaaaaaaaaaaagccttatgtgagtatgctactgtaatcttatgaatctttttaaatatccaacttctgaaatatttgtaggtttaactacaaataaataattcaatatatagataaatgtgtacatattccctatctttactgagagcctagcaagccatggcattccagtagttttgagcacatttaatacccagttattggtttatatcattttttaataaaaggaaccagaactccttagagaagaggctgttttcaagttgtggcagaaaaggtacaacatgatttgaggaaatactgcattggaaaataaataaatgttcacagaataatgttga

SEQ ID NO: 124 - protein, 510 aa, Homo sapiens
MAAAALRDPAQVPVAADLLTDHEEGYVTFEDVAVYFSQEEWRLLDDAQRLLYRNVMLENFTLLASLGLASSKTHEITQLESWEEPFMPAWEVVTSAIPRGCWHGAEAEEAPEQIASVGLLSSNIQQHQKQHCGEKPLKRQEGRVPVLRSCKVHLSEKSLQSREVGKALLISSGVLKHQVTHTGEKSHRSSKSREAFHAGKRHYKCSECGKAFGQKYLLVQHQRLHAGKKTYECSECGKLFRDMSNLFIHQIVHTGERPYGCSNCGKSFSRNAHLIEHQRVHTGEKPFTCSECGKAFRHNSTLVQHHKIHTGVRPYECSECGKLFSFNSSLMKHQRIHTGERPYKCSECGKFYSHKSNLIKHWRVHTGERPYKCSDCGKFFTQCSSLMQHQKVHTGEKPFKCNECGRFFRENSTLVRHQRVHTGAKPYECRECGKFFSQSSTLMQHRKVHIGEKPFKCNECGRLFRENSSLVKHQRVHTGAKPYECRECGKFFRHNSSLFKHRRIHTGEMQ

SEQ ID NO: 125 - DNA, 3639 bp, Homo sapiens
gagatttggaggcctcgcgtggggagagggccgcgtctgtggaggagcttggctccgcacctgctgggctggcgaacccgaaattgggcttggaacccgggagccagatcttggaccctgaactgcacctctgtcaagagcccagaggagaaagaatggctgtttcagtagcaatgtccaagctctgcattctccagactctgtgctttcctaagataggaacccagaagaggactgatcatttcttgcagctctaaaaaccatggctcggaaattagtgatgttcagggatgttgccattgacttctctcaggaagagtgggaatgcctggactctgctcagagagatttgtatagagatgtgatgttggagaactatagcaacttggtatcactagacttgccttcaaggtgtgcaagtaaggacttatctccagaaaagaacacttatgaaacagaattatcccaatgggaaatgagtgacagacttgaaaactgtgatcttgaagagtccaattccagggattatttggaagccaaaggcaagatggagaagcaacaagaaaatcagaaggaatatttcaggcaagggatgatcatatatgacaaaatgtccattttcaaccagcatacttacttatctcaacattcaagatgtcattctactgagaaaccctataaatgtaaggaatgtgggaaagccttcagacgagcctcacacctaacacaacatcaaagtattcatactggtgaaaaaccctatgaatgtaagcaatgcgggaaggcctttagtcgtgattcacaactcagtcttcatcagagacttcatactggtgagaaaccctatgcatgtaaggaatgtgggaaggcctttactcaaagctcacaacttattttacatcatagaattcatactggtgaaaaaccatataaatgtgaagaatgtgggaaagcctttattcgtagctcacaacttacccgacatcaaaaagttcatactggtgagaaaccttatgaatgtaaagaatgtgggaaggcctttactcagaattcacaacttacactacaccagagacttcatactggtgaaaagctctatgaatgtaaagaatgtaggaaggtctttactcagctctcacaacttattctgcataagagaattcataccggtgagaaaccctatgaatgtaaggaatgtggaaaagcttttatttgtggctcacagctttctcaacatcagaaaattcataatggggaaaaaccatatgaatgtaaggaatgtggaagggcctttattcggggctcactactgatgcaacatcagaggattcatactggtgaaaaaccctataaatgtgaagaatgtgggaaggcctttatccgtggctcacaacttactcaacaccagagaattcacaccaatgaaaagccctatgaatgtaaggaatgtggaaagatgtttagtcatggctcacaacttactcaacatcagagaatacacactggtgagaaaccctatcaatgtaaggaatgtggaaaagcgtttaatcgtggctcactccttacacgacaccagaggattcatactggtgagaaaccctatgaatgtaaagaatgtggaaaaacctttagtcgtggctcagaacttactcaacatgagcgaattcacacaggtgagaaaccctatgaatgtaaggaatgtgggaaatcttttattcgtggttcccagcttactcaacatcagagaatccatactggtgagaaaccttatgaatgtaaagaatgtagaatggcctttactcagagttcacatctttcccaacatcaaagacttcacactggtgagaaaccctatgtgtgtaatgaatgtggaaaggcctttgcgcgtggcttactacttatacaacatcagagaattcatactggtgagaaaccatatcaatgtaaggaatgtgggaaagcctttattcgtggttcacagttgactcaacatcagcgaattcacactggagaaaaaccctatgaatgcaaggagtgtggcaaggcctttagtcatggctctcagcttactctacatcagagaatccatactggtgagaagccctatgaatgcagagaatgtagaaaggcctttactcagagttcacatctttctcggcatcagagaattcatactggtgagaaaccatatcaatgtaaggaatgtgggaaggcctttactcgtggttcacagctaactcaacatcagagaattcatatcagtgagaaatcttttgaatataaggaatgtgggattgactttagtcatggctcacaagtttacatgtgaattgtctgattatttgagatcactatgaagaggttctctggttgttagcagcaaagaattctcacaaatgtgaatatgggcgcacatttgcctcataaagcacagcatcagataatttatgtgagagaaaatggtagtgtcattcatatagaaaaacatcattactggaaacctattaaacattagcaaattggagaatagttttaatatagtaaatgtaggaagccctttagccatattgaaaacaaatatctttttcaacgttatcttagctctactagttgatctttttgttatatgtatcatgatacttaacctctaccttggtttaatcattttaagatagacctaagtatattacctttattgtaagattcttggaagtattatgtaagttattacatgtaaaagctcttagaatggtgccttgaacgtagcataccacaaatattagctaccattttcactagtgttattttagagaatttgcatgagaggagagtacttatgagtataatgaatattgagaaatcttttatcaacacatccaagatgacttggttggggggcactgtatgccataatgaatgtgagaaagctgtcatttaaatctcatccattattgctataagaggaaattcatactgttaaaaaaaaaaaaacccagtggatataatcagtgtattattaaaaaaaaaaaaacccagtggatgtaatcagtgtattattgagcacagctgttagagaagtgggacaaggtgtgaagtgatttttaacgaagtctaagatccaaagtctaataaatctaggaattttttaaaaacttgaatgtattgcttttgaagtaaacaaaataactgatattacagactattttgcaatgaaaaatgatgagagtttgtgatacagactgcttttttcctaccctatatctattttctcttttttagtaacaaatttctgggctgaaaatctcagccttccttgcaggtcaacaagatagaagtgatatttatatgagtaggagatttacgaaatccatttttcctgtctttttttccgtgcctacaatgtggacatctaagctggagctccgttactctcatggggactttgagaatggtatctgggtgttatggatcatggagcagaaatacagaaggagtctgcaaccctgatgactttgtggaacagccatactagctctggtctgcttgcctcctgtttctctttaaataaaattaaacatcttatttgttgatgctattgtagttctgttattgacaataaaaattcttaaggatataaaa

SEQ ID NO: 126 - protein, 688 aa, Homo sapiens
MARKLVMFRDVAIDFSQEEWECLDSAQRDLYRDVMLENYSNLVSLDLPSRCASKDLSPEKNTYETELSQWEMSDRLENCDLEESNSRDYLEAKGKMEKQQENQKEYFRQGMIIYDKMSIFNQHTYLSQHSRCHSTEKPYKCKECGKAFRRASHLTQHQSIHTGEKPYECKQCGKAFSRDSQLSLHQRLHTGEKPYACKECGKAFTQSSQLILHHRIHTGEKPYKCEECGKAFIRSSQLTRHQKVHTGEKPYECKECGKAFTQNSQLTLHQRLHTGEKLYECKECRKVFTQLSQLILHKRIHTGEKPYECKECGKAFICGSQLSQHQKIHNGEKPYECKECGRAFIRGSLLMQHQRIHTGEKPYKCEECGKAFIRGSQLTQHQRIHTNEKPYECKECGKMFSHGSQLTQHQRIHTGEKPYQCKECGKAFNRGSLLTRHQRIHTGEKPYECKECGKTFSRGSELTQHERIHTGEKPYECKECGKSFIRGSQLTQHQRIHTGEKPYECKECRMAFTQSSHLSQHQRLHTGEKPYVCNECGKAFARGLLLIQHQRIHTGEKPYQCKECGKAFIRGSQLTQHQRIHTGEKPYECKECGKAFSHGSQLTLHQRIHTGEKPYECRECRKAFTQSSHLSRHQRIHTGEKPYQCKECGKAFTRGSQLTQHQRIHISEKSFEYKECGIDFSHGSQVYM

SEQ ID NO: 127 - DNA, 4637 bp, Homo sapiens
gcattccgctctccatggaaacgcggctgaccgtctctggaggtttagagggggagggagttgggcgaggggcccagaagtggaagaagtttagggaagtaagttcagcttttaagaggtcgcggcgattccaaggagagtcagtccacaggtcctggctaccctgggaagagacaagaagtaaatgaagaaagaggaagattccaggacctagatatgatttctgtggacacccttcactggtgactgaagtttctaaatagaaatttaaggcagatccagaggagacaaagacagagtatcccaggtgctggccatttcccacaacagaagaaaatgatcaatgcccaggaattgctgacactggaggatgttactgtggagttcacctgggaggagtggcagctcctgggcccttttcagaaggatttgtaccgggatgtgatgttggagatctacagcaacctgctatcaatgggttatcaagtcagcaaaccagatgcactctccaagttggaacgaggagaagaaccatggacaatggaagatgaaaggcacagtcgaatctgtccagaaaacaacgaagttgatgatcatctgcaggatcacttggaaaatcaaaggatgctgaagagtgtggaacaataccatgaacataatgcatttggaaatactgcctctcaaaccaaaagcctttgtcttttcagggaaaatcatgatacatttgagttatatataaaaactttgaaatcaaatttaagtttagtcaaccagaacaaaagctgtgaaattaacaactctactaaatttagtggagatgggaaatcatttcttcatggtaactatgaagaactttattctgcagctaaattctctgtaagtacaaaagccaatagcactaaatcccaagtcagtaagcatcagagaactcatgaaatagaaaaaaaccacgtatgcagtgaatgtgggaaagcgtttgtcaagaagtctcagctcactgatcatgagagagttcatacaggagaaaaaccttatggatgtactttgtgtgcaaaagtgttctccagaaagtccaggctaaatgaacatcaaagaattcataaaagagagaaatcttttatatgcagtgaatgtggaaaagtcttcactatgaagagccgtctgattgaacatcagcgaactcatactggagagaaaccctacatatgcaatgaatgtggaaaaggcttcccaggcaagcgtaatctcattgtacatcagcgaaatcatactggagagaaatcctatatatgtagtgaatgtggaaaaggcttcactgggaagagcatgcttattatacatcagcgaactcatacaggagagaagccctacatctgtagtgaatgtgggaaaggcttcaccacaaaacactatgtcatcatacatcaacgaaatcatacaggagagaaaccatatatatgcaatgaatgtgggaaaggcttcaccatgaagagccgtatgatcgaacatcaacgaactcatacaggagagaaaccctacatatgcagtgaatgtggaaaaggctttcccaggaagagtaatcttattgtacatcagagaaatcatacagtagagaagtcatatctatgtagtgaatgtggaaaaggttttactgtgaaaagcatgctcatcatacatcagcgaactcatacaggagagaagccctacacatgcagtgaatgtgggaaaggcttccccttgaagagtcggctgattgtacatcagcgaactcatactggagagaaaccttacaggtgcagtgaatgtgggaaaggtttcattgtgaatagcggactgatgttacatcagcgaactcatactggagagaaaccgtacatatgcaatgaatgtggaaaaggttttgcctttaagagcaatcttgttgtacaccagcgaactcatactggagagaaaccctttatgtgcagtgaatgtggaaaaggcttcaccatgaaacgctatctcattgtacatcagcaaattcatacagaagagaaatcttgtatatgtagtgaatgtggaagaggctttgccaaggaaacagagcttgctttacataagcaagttcatactggagaaaaaccttatggatgtaatgaatgtggtaaaggcttcactatgaagagccgtctaattgttcatcaacgaactcatacaggagagaaaccctttgtatgcagtgaatgtagaaaagccttctcctcaaagagaaatctcattgtacatcagcgaactcataatggaaacaaaccctgacaatgcagtggacatgttcatgcctttgggaagaaaatctgccttgtacaacatcagagatttcacagtatagattttctacatgtgtactgagtatgaaaaatcatatttcaaaatccagtgttattcactaggatgaatgctatcaatgtcagaaaggcttcaacatgaattcaggctctgaattctttgatgtaccaatgtatagaaaattactcatctgagagagagtctgtggattgggggtaacctttcatttgtcaaccttcattaaaactatgacaacgtccacatgacaaatgtgtaaggtacatagtccttttgcagagaatctgaactgattacatacaaacaaattcatgcagagagaaaaccacgttagtaatgtgaactgattaaacagcagtgtgctcctagcatacatgcatataggcagtgtagagcagcctgttgctagattttcacccttggaagacaatgcaatttccaggagcgaattttaatgaatgcagagaatgcactagtgccttcggtgattaattacctcatattttatgtcacaataaacatgtaggaaataaacttgatacatccaatgcagaaaagtcttgaaaattttctaagtaactatgtcttgaaaagtatttactgagataaatcttacaaaggagtaggctaggaaagccttctatgggaagaaagaccctatctcttcagtgatcataatagatcatcaatgaacttacacatactagcagcattatcatgggaaagcctttgcccagaaataaaaccttaacagttggcagatatatttcatactggagaacaagtttcagatggcagtgaatacacgaggatttcagtgatacatgctgcctcatcatcattacttcatacagaaataaaacttatatgaagagtaactttaaaaaggatcaggaaattcatgaagtaaaaaagtctcatgaaaatgatacataatgccgggcatggtggcttgcacctgtaatcccagcactttgggaggccaaggtgggtggatcacttgaggtcgggagttcgagaccagcctgaccaacatggtgaagcccccctctctactaaaaatacaaaattagccgagcatggtggctcacgcttgtaatcccagctactctggaggctaagctggagaatcacttgaacctgggaggcagaggtttcagtgagccaagattgcgccattgcattccagcctgggcaacaagagcgaaactctgcctcaaaaaaaaaaaaaaaaaaccatatttgaggactgtcacaaatctaaactcatgatacacttgatatctattctgtgacagcataccttgcatcatattatcaatgattccataattgtaaagcgggctgttcttatcactgattaaattttaatcctatatataacacaggtgttttctgtgccaatctggtgttatttattagttcttacatattataggccccaaatttatttttttcaatttactgataaatgtaattcagtatatttggatgtgtttatccaagttactaggtaccattatgtagtttacaaaaatgccttaaatgttatttttctaaaatttgttttgaaataattctagattcacaagagattacaaaatatacaaaagtttcctgagtattctttgcttagcatcatcaatgttatcttacataaccataataataaaaaccacggagttctgctcttgttgcccaggttggagtgtaatagcacgatcttggctcactgcaaccccgcctcccaggttcaagagattttcctgcctcagcctcctaagtagctgggattacaggcacccacgaccacgctcgactaatttttgtatttttagtagagacggggtttcactgtgttggccaggctggccttgaactctcgaccccgggcggtccacccgcctcagcctcccaaagtgctgggattacaggcatgagccaccacgcctggcctcctcttgctacctctttatactcacactgtcctcccaatatgacccatggtagccactgatcccattaccctaattttgttatttcaagaatgctattaaaatggaatcgtaaggtacgcaagctttgagatagggctttgttcactcagcaaattacccttaagatctatccaagttgttaggtgtctaaatagttttaatttttgttactgagttagtattcttttaaatggatgcaccagggtttgtgtatccattcactgttgatggacatttgggttgtttccagtgttttgctgttataaataaagatgctgtgactatttgtgtacccga

SEQ ID NO: 128 - protein, 652 aa, Homo sapiens
MINAQELLTLEDVTVEFTWEEWQLLGPFQKDLYRDVMLEIYSNLLSMGYQVSKPDALSKLERGEEPWTMEDERHSRICPENNEVDDHLQDHLENQRMLKSVEQYHEHNAFGNTASQTKSLCLFRENHDTFELYIKTLKSNLSLVNQNKSCEINNSTKFSGDGKSFLHGNYEELYSAAKFSVSTKANSTKSQVSKHQRTHEIEKNHVCSECGKAFVKKSQLTDHERVHTGEKPYGCTLCAKVFSRKSRLNEHQRIHKREKSFICSECGKVFTMKSRLIEHQRTHTGEKPYICNECGKGFPGKRNLIVHQRNHTGEKSYICSECGKGFTGKSMLIIHQRTHTGEKPYICSECGKGFTTKHYVIIHQRNHTGEKPYICNECGKGFTMKSRMIEHQRTHTGEKPYICSECGKGFPRKSNLIVHQRNHTVEKSYLCSECGKGFTVKSMLIIHQRTHTGEKPYTCSECGKGFPLKSRLIVHQRTHTGEKPYRCSECGKGFIVNSGLMLHQRTHTGEKPYICNECGKGFAFKSNLVVHQRTHTGEKPFMCSECGKGFTMKRYLIVHQQIHTEEKSCICSECGRGFAKETELALHKQVHTGEKPYGCNECGKGFTMKSRLIVHQRTHTGEKPFVCSECRKAFSSKRNLIVHQRTHNGNKP

SEQ ID NO: 129 - DNA, 4642 bp, Homo sapiens
agagaagcttctcgcgcacaggaagtcgctgcgaggaggcgcgtgtgcggggagttgaatctcccgctcccttgaggctggggttgcgtctgttgacgcggccgactacaatcccgagggagactcacattgggacttgtcctcctcctcctggacattttgggggctcgtcagcatggacagcgagtcagccatgggtggaagggaggctttctcacagctcccttgtgcttcccacagccctgccagccgggaacacggaggggaaggaggaggagcttaaaagaggctactgaaccccagttggccatggctgaggaatttgtgaccctcaaggatgtcggcatggacttcaccttgggagactgggagcagctcgggctggaacagggggacacgttctgggacacagcgttggacaattgccaggacctcttcctgctggaccccccaagacccaacctgacctcccacccagatggcagtgaagatctggagcctctggcaggaggaagcccagaagcaacaagccctgatgtgactgagaccaagaactctcctctgatggaggatttcttcgaagaaggattctcccaggagattatagagatgttatccaaggatggcttctggaactccaatttcggagaagcctgtatagaggacacctggttagatagtttgctaggcgatccagaaagtcttctgaggtctgatattgccaccaacggggaaagtcccacggaatgcaagagtcatgaattaaagagaggactcagtcctgtgtccaccgtttccacgggagaagattccatggtgcataatgtttctgaaaagaccctcacaccagctaagtctaaggaatataggggtgagtttttctcctactccgaccacagccagcaggattctgttcaggaaggggagaaaccatatcaatgtagtgaatgtgggaaaagcttcagtgggagttaccgtcttacccagcactggatcactcatactagggagaaacccactgtccatcaagagtgtgagcaaggttttgaccggaatgcttccctttctgtgtatccgaaaactcacacgggctacaaattctatgtgtgtaatgaatatgggacaacttttagtcagagtacatacctgtggcatcagaaaactcacactggagaaaaaccatgtaagagtcaagatagtgaccacccacccagtcatgacacacagcctggtgagcatcagaaaactcacacagatagtaagtcctacaactgtaacgaatgcggcaaggcttttacccggatcttccaccttactcggcaccagaagatccacactcggaaacgctatgagtgttccaagtgccaggcgaccttcaacttgagaaaacacctcatccaacatcagaaaactcacgctgcaaaaactacctctgagtgtcaggagtgtgggaagatttttaggcacagttcgctgctcattgaacaccaggctcttcatgctggagaggagccttataagtgtaacgaacgtgggaaatccttcaggcataactctaccctaaagatccatcagagggttcacagtggagagaagccttacaaatgcagtgagtgtgggaaggccttccaccggcacactcaccttaatgaacatcggcgaattcatacaggctacagaccccacaaatgtcaggaatgcgtcaggagtttcagccggccctcacatctgatgcgacatcaggccattcacaccgcagaaaagccctatagctgtgctgaatgcaaggagactttcagcgataacaatcgccttgtgcaacaccagaaaatgcacactgtcaaaaccccatatgaatgtcaggagtgcggagaacgcttcatttgcggctcaaccctgaagtgccacgagagtgttcacgccagagaaaaacaaggattttttgtgagtgggaagatcttggatcagaacccagaacagaaagagaagtgctttaagtgtaacaaatgtgagaaaacctttagctgcagcaaatacctaactcagcacgagaggattcacaccaggggagtgaagccctttgaatgtgaccagtgtgggaaagcctttggccaaagtactcggctcattcaccatcaaagaatccactctagagtgaggctgtataaatggggtgagcaagggaaagccatcagcagtgcctcccttatcaaacttcagtccttccacacaaaggagcacccttttaaatgtaacgaatgcggaaagaccttcagccacagtgcacacctctcaaaacatcagttaattcacgctggagagaatccctttaaatgtagtaagtgtgacagagtcttcacccagagaaactaccttgttcagcatgagcgaactcatgccagaaagaagccgttggtgtgtaacgaatgcgggaaaacgttccgtcagagctcatgcctttctaagcatcagagaattcactcaggtgagaagccctatgtatgtgattactgcgggaaggccttcggcctgagtgctgagcttgtccgccaccagagaattcacactggagaaaagccttatgtttgtcaggaatgcgggaaagccttcacccagagctcatgcctttctattcaccggagagttcacactggggagaagccctacagatgtggtgaatgtgggaaagcctttgcccagaaagcaaatctaacacagcaccagagaattcacacaggggagaagccttactcctgtaatgtgtgtggcaaagcttttgtcctcagtgcccatctcaaccagcacctgagagttcacacccaggagacactttatcagtgtcaacgttgccagaaagcctttcggtgccactcgagcctcagccgccatcagcgtgtacacaacaagcagcaatactgcctgtagccattgggtggcagcagagtcccagaatatgagaccgttactcggatgttgaaagttggaaactatcccattgcaagtttctctccaaataaatgcatctaaagattgattagaaagtttgtgcgcatgtttttcattataacaatgaaaacacaaaagtggagaagctgtacaacgtcaggattcagaggtaggctctggagccagtctaccttgagttaaatcccacctctgccatctactacctaagtgaccttgggaaggtcagaaaaatctctcagggcctcggtgtccttatctgtaaaatgggcatcacctacctcagagggcttttctgaggattaaataaataaatgtgaagcacttagaactgatggccagcacatgagggctcaccaagtgtaagccacaaatacacatcagctatagcacaaatatacttgtgttacaagaaaggaattagtaatctgtgtttactgtagttaatgttcttacaatgtatcgcttttaatttaagttttccttttttacagtttttctccagcactttactcttcttaagtgcctggccttttttgtccctttatctctcctggtttttttcttaagccccagaaagccaaaaagaacatgtaaactcttcacctcaactagctacaaccttccactcctaacctcccaagcttctcacttaaagaggactccctatcccacaaacacatgctccctcttcctatgaccttcctccatttaacagtgttggttatgcaataagacacccaatttttcatgggagttgacaccaaaacacagctggattccatcaggaaagctgcattgatcagggtgttaaccgcatatgaaacaacccatatggaagacatacttaggggtcaaacctgtggtgtgtggaagtgaccactgggatgtcatcattcaccatttatccaggatggccgctcaccaggcaatttgctaggctcgggggcgggtagtatccatacactatgcactactgctctgaagcttctggaatcagaaatgaacccattttcatcgacgattgctgttagttgacaagtgacatcttgaaaatgccacattccctcatgtcacaggaagttctgggatcaccaaggattgttggagagtccagtgagatggaaccacacaaccagttccctaccagtgtcttgtcagctctgggtgtttgttccctgccactaagtggctcagtcacacctttgctgaaacacagtagtcttatgaaaagcactggacacatactttgaatacctttcatattttaggtgctgaaaatggtgagggagtgagtgctctgcacccttgggcttttcaactcttgcacctggagttctgctggttaagtttgttaaacttagttgaaactgggaacctgttggctaaccattggggccttacactgtttttcaaatggttgcaacatttaacttctcgcacatggttcccgtcctctggagctctgtcttgtcggggagatgggcatgttgtataccaaaagagtgtacaaagtgttgcagggctgtgacacaatagggactctatggaaaactggcagccattgggtgtgggggcagtctgtaaatcagtcacctgtgttgctgcaggccaaggtagaaacgccctccgtgtgtgcatatttgttggttctctgattaaagttttgagtctaaaa

SEQ ID NO: 130 - protein, 871 aa, Homo sapiens
MAEEFVTLKDVGMDFTLGDWEQLGLEQGDTFWDTALDNCQDLFLLDPPRPNLTSHPDGSEDLEPLAGGSPEATSPDVTETKNSPLMEDFFEEGFSQEIIEMLSKDGFWNSNFGEACIEDTWLDSLLGDPESLLRSDIATNGESPTECKSHELKRGLSPVSTVSTGEDSMVHNVSEKTLTPAKSKEYRGEFFSYSDHSQQDSVQEGEKPYQCSECGKSFSGSYRLTQHWITHTREKPTVHQECEQGFDRNASLSVYPKTHTGYKFYVCNEYGTTFSQSTYLWHQKTHTGEKPCKSQDSDHPPSHDTQPGEHQKTHTDSKSYNCNECGKAFTRIFHLTRHQKIHTRKRYECSKCQATFNLRKHLIQHQKTHAAKTTSECQECGKIFRHSSLLIEHQALHAGEEPYKCNERGKSFRHNSTLKIHQRVHSGEKPYKCSECGKAFHRHTHLNEHRRIHTGYRPHKCQECVRSFSRPSHLMRHQAIHTAEKPYSCAECKETFSDNNRLVQHQKMHTVKTPYECQECGERFICGSTLKCHESVHAREKQGFFVSGKILDQNPEQKEKCFKCNKCEKTFSCSKYLTQHERIHTRGVKPFECDQCGKAFGQSTRLIHHQRIHSRVRLYKWGEQGKAISSASLIKLQSFHTKEHPFKCNECGKTFSHSAHLSKHQLIHAGENPFKCSKCDRVFTQRNYLVQHERTHARKKPLVCNECGKTFRQSSCLSKHQRIHSGEKPYVCDYCGKAFGLSAELVRHQRIHTGEKPYVCQECGKAFTQSSCLSIHRRVHTGEKPYRCGECGKAFAQKANLTQHQRIHTGEKPYSCNVCGKAFVLSAHLNQHLRVHTQETLYQCQRCQKAFRCHSSLSRHQRVHNKQQYCL

SEQ ID NO: 131 - DNA, 3851 bp, Homo sapiens
ctttgtgtttctctgcgtccagagctgcagttctcctcttcactgctctgtgtcctctgctcctagaggccaagcctatgtgtccttgtgtcctgcaggtatctgcagatttatggctaaaagaccaggaccccctggaagccgagaaatgggactgttgacattcagagacatagctatagaattctctctggaggaatggcaatgcctggattgtgctcagcggaatttatatagagatgtgatgttagagaactacagaaacctggtctccctgggtattgctgtctctaagccagacttgatcacctgtctggagcaaaataaagagtcccagaatataaagagaaatgagatggtagccaaacacccagttacgcgttcccatttcacccaagaccttcagccagagcagggcatcaaagattcactccaaaaagtaataccaagaacatatggaaaatgtggacatgagaaattacaatttaaaaaatgctgtaaaagtgtgggtgaatatgaggtgcacaagggaggttatagtgaagttaaccaatgtttgtcaactacccaaaacaaaatatttcagactcataaatatgtcaaagtctttggtaaattttcaaattccaatagagataaaacaagatatactggaaataaacatttcaaatgtaacaaatatggcaaatcattttgcatgctttcacacctaaatcaacatcaggtaattcatactagggagaagtcctacaaatgcaaagaatgtggcaaatcctttaactgctcctcaaaccatactacacataaaataattcatactggagagaaaccatatagatgtgaggaatgtggcaaagcctttagctggtctgcaaaccttactagacataagagaactcatactggagagaaaccctacacgtgtgaagaatgtggccaagcctttaggcgctcctcagcacttactaaccacaagagaattcatactggagagagaccctacaaatgtgaagaatgtggcaaagcctttagcgtatcctcaaccctcactgaccacaagagaattcatactggagagaaaccctgcaggtgtgaggaatgtggcaaagcctttagctggtcctcaaaccttactagacataagagaattcatactagagagaaaccctatgcctgtgaagaatgtggccaagcctttagcttatcctcgaaccttatgagacataggagaattcatactggagagaaaccctacacatgtgaagaatgtggccaagactttaggcgctcctcagcacttactatccacaagagaattcatactggagagagaccctacaaatgtgaagagtgtggcaaagtctttagcttatcctcaaccctcactgaccacaagagaattcatactggagagagaccctacaaatgtgaagaatgtggcaaagcctttagcttatcctcaaccctcactgaccacaagagaattcatactggagagagaccctacacatgtgaagaatgtggcaaagcctttaattgctcctcaacccttatgcaacataagagaattcatactggagagaaaccctacaaatgtgaagaatgtgagcaagcttttaagtggcattcaagtcttgctaaacataagataattcacactggagagaaaccctacaaatgtgaataatatggcaaagtccaccctcaggccttataatacataaaataatttacactggaaaaaaacactacaaatgtagagaatgtggccaagcctttaaccagttccaaaccttaattgaatgtaagagaattcatattggacagaaattttataaatgtaaaaaaatgtaacaaagcctttaaccaaccctcaaaccttaataaacctaagagaatttattttaaaaaaatttttttgagttggagtctccctgtgtcacccaggctggagtgcagtgtcatgatctcagctcactgtaacctctgccttccgggttcaagcgattctcctgcctcagcctcctgagtagctgggattacaggcgtgtgccaccacactggctgatttgtgtatttttagtagagatagagtttcaccatgttggccaggatggtcttgaactcctgacctcaggtgatccacctttgtcagcctcccaaagcctaagagaacttatattacagagaccctagaaacataaaaaaagtgacaaaacctttaagcacatctcaggccttacatattatctgatcattcattctagagagaaactctacaaaagcaaagaatgtggtaaagctgttaactagtcttgaacccttattatacataagagaattaatactgaagagaaaccctacaataaggaatatggtaatgtctttaaaaagtcctcaaacctgaataaatgtaagataattgatattggagagaaaccctgcaattgcagaaaaaaatgtggcaaaccctttaactggttctccatgcttactcactaaaaaattttatactggagagaaactctgcttacataaaaatgtgacagagcatttaagcacacctcaaacttttctaaaaaagagaaatcatactggtgagaaactctagaaatgtgttaaatgtggcaaggactttaaatggtagtcacacgttatggtaggtaagatagtttatactgaagaagactcctacaaatatgaagaatgtggcaaaacttttaacaaattctcacaccttatggtacaggaaagcatttatactagagaaaaattgtacaaagaatgtgaaaaaccattaatatcaggtcacatcttactcaatatcagaaagtttatacttaataaagggattataggtcaggtgtgttggctcatgcctataattccagcactttgggagaccaaggtcggtggatcatgaggtcaggagttcaagaccagcctggccaacatggtgaaactccatctctactaaaaatagaaaaactagctgggtgtggtggcgtgcacttgtaatcccagctacttggcaggcagaggtaggagaattgcttgaaccggggaggcagaggttgcagtgagctgagatagagccactacactacagcctgggtgacagagcaagactctgtctcaaaaaaaaaattataaatgtgattactgtaaaaagaccttttggaaaatataggcctttaaagtaaagaccagttattctgaagacaaacatacaaacttaaagaggattgctgtacctttacttccattacagattttattgtacacattttatattaaaggaaaaatttgaagatctgagaagatgctcaaactttgttgaacattagagaatttatattggagagaaagtctaaacatgtaatgaatgtgaaaaacattttttcaaaacctccagcttagaaaacaccagtttgtactaaatatttttgcagaaccagtaaatggggaaaacatattaaatcaaaaattaagtctatataagcatctgaggggtcacagtagaaagaatgaaggcactgaaacttcatacattacactaaatcagagggttgagtgtaaaagagatccaaagctaacaccatatacatgttaaagaagtagtttttttcgagattcataattaccttcgaggtatgcttctttcttctataaaaaaatagtttctgaacagcaaataataatgtaactcaagtctcagattccgtcatgttgactcttcccattgtttgtgaaagtatttgatcagttgtttcatcagagataggagagattgttttttatcaattgtacgtttatgtaataaaatgcaataaatttaaaaattttttaaa

SEQ ID NO: 132 - protein, 524 aa, Homo sapiens
MAKRPGPPGSREMGLLTFRDIAIEFSLEEWQCLDCAQRNLYRDVMLENYRNLVSLGIAVSKPDLITCLEQNKESQNIKRNEMVAKHPVTRSHFTQDLQPEQGIKDSLQKVIPRTYGKCGHEKLQFKKCCKSVGEYEVHKGGYSEVNQCLSTTQNKIFQTHKYVKVFGKFSNSNRDKTRYTGNKHFKCNKYGKSFCMLSHLNQHQVIHTREKSYKCKECGKSFNCSSNHTTHKIIHTGEKPYRCEECGKAFSWSANLTRHKRTHTGEKPYTCEECGQAFRRSSALTNHKRIHTGERPYKCEECGKAFSVSSTLTDHKRIHTGEKPCRCEECGKAFSWSSNLTRHKRIHTREKPYACEECGQAFSLSSNLMRHRRIHTGEKPYTCEECGQDFRRSSALTIHKRIHTGERPYKCEECGKVFSLSSTLTDHKRIHTGERPYKCEECGKAFSLSSTLTDHKRIHTGERPYTCEECGKAFNCSSTLMQHKRIHTGEKPYKCEECEQAFKWHSSLAKHKIIHTGEKPYKCE

SEQ ID NO: 133 - DNA, 4746 bp, Homo sapiens
agtttcccacaaacccggaagcggatcgcgtggagtgaaggtcacgccgcggcgcgattgacttctaaagagtcatgctgtgtgatgaaaaagcccagaagagaaggaagaggaaagcaaaggagtcagggatggctcttcctcagggacacttaacattcagggacgtggccatagaattctctcaggcggagtggaaatgcctggaccctgcacagagggctttatacaaggatgtgatgttggagaactacaggaacctggtctccctgggaatctctcttcctgacctgaatattaactccatgttggagcaaaggagggagccctggtctggtgagagtgaagtgaaaatagcaaaaaattcagatgggagggagtgcatcaaaggtgtgaacacagggagcagctatgcattgggaagcaatgcagaagacaaaccaattaaaaaacaacttggagtatcctttcacttacatctgtctgaactggagctatttccagatgaaagggtaataaatggatgtaatcaagttgaaaactttatcaaccacagttcctctgtttcctgtcttcaagaaatgtcttccagtgtcaaaacccccatttttaataggaatgattttgatgattcttcatttctcccacaagaacagaaagtacaccttagagaaaaaccttatgaatgtaatgagcatagcaaagtctttagagtatcttccagccttactaaacatcaagtaatccatactgtagagaaaccttacaaatgtaattcatgcggcaaggtctttagtcgcaattcacaccttgcagaacattgtagaattcatactggagagaaaccttacaaatgtaatgtctgtggcaaggtttttagttacaattcaaactttgcacgacatcaaagaattcataccagagagaagccgtatgaatgtaatgaatgtggtaaagtcttcagtaataattcttaccttgcacgacatcaaagaattcatgctgaagagaaaccttacaaatgtaatgaatgtggtaaaggcttcagtcataagtcatctctagcaaatcattggagaatttatactggagagaagccttacaaatgtgatgaatgtggcaaggccttctataggattgcgctccttgtacgacatcagaaaattcatactggagagaaaccttacaaatgtaatgaatgtggaaaggtctttattcaaaattcgcacctagcacaacattggagaattcatacaggagagaaaccttacaaatgtaatgaatgtggaaaagtatttaatcaactttcaaatcttgcacgacatcgaagaattcatactggagagaagccttacaaatgtaatgaatgtggtaaagcatttagtgagtattcaggcctttcagcccatcttgtaatccacactggagagaagccttacaaatgtagtgaatgtggcaaggcattcagacacaagttatcactaaccaatcatcagagaatccatactggagaaagaccttacaaatgtaatgaatgtggcaaggtcttcaatcgaattgcacaccttgcacgacatcggaaaattcatactggagagaaaccttacaaatgtaatgagtgtggcaaggcctttagtcgcatttcatacctagcacaacattggacaattcatatgggatagaaactacaaatgcaacaaatgcgtcaaagaatttagtgtgcactcaagccttactacccatcttttattccatactgcaaagaaattttgcaaatgtaaagaatatgacaaggtcttcaaacacaagtttttctaataactcattagagaatttatactggagagacttcacaattataataaatgtgtggaaaagtcttcaaaaaaatttcacaccttgcaaaaggagatctaaaaaacacaatcagaaatgacaaaggggacattaccaccaaccccacagaaatacgaaaaaccctcaaagattactataaacacctgtatgcacacaaactagaaaacctagaaaaaattaataaattccttgaaagatataaccccccaagattgaaccaagaagaaattgcatccctgaacagaccaataatgagttccaaaatttaatcactaattaaaaatctatcaaacaaaactctggaccagacagatttatagttgaagcctacgagatgtataaagaaaagctgttaccaatcttactgaaactgttcaaaaacatggatgcagagggactcctccctatctgattctatgaggccagcatcattctaataccaaaacctgacaggcacaatgaaaaaagaaaacttcaggctggtactcctgacgaatataggtgccaaaatcctcagcaaaatactagtaaaccaaatccatctgcacatcaaaaagctaatccaacattatcaagcaggctttagtgttgggctgcaaggttggttcagtatacacaaatcaataaatgtgatttatcacatacacagaactaaaaacaaaaaccacatgaccatgatcatctctttagatgcagaaaggtttttaataaaattcaacatcccttcattttaaaaaccctcaacaaattacacattgagggaacatacttcaataagaaccatctatgctggactcacagccaaattaatactgaacaagcaaaagctggaagcattccccttgagaactggaaaatgacagggatgaccactctcaccactccgattcaacatagtactggaagtcctaagcttagtgatcaggcaagataaagatatgaaaggcatatataaataggaagaggggaagtcagtttctcttgcagaagatataattctgtatttagaaaacctgttgtctctgcccaaaggctcctagatctgataaacaacttcaaaaaagtttcaggatacaaaatctgtgtacaaaaattagttgcatttctatacaccagtaatgtccaagctatgaaccaaatcaagaatggaatcccattcacagtagccacaaaaagtataaaatacctaggaatacagccaaccaggtaagtgaaagatttctacaatgagaattacaaagcagtgcacaaagaaatcagaaacaataaaaattgaaaaatatctcatgctcatggataggaagaatcagtattgttaaaatactgcccaaagcaatttacagagccaatgctatttctatcaaactaccaatggcatttttcacagaatcagaagaaaacattctgaaatttatttggaaccagaaaagcccaacctaaatagcaaaagcaatcctaagcaaaaagagcaatgtttgaggtatcacactacccaactttaaaccatactacaaggctacagcaactaaaacagcatggtactggtataaaaaaagacacatagatcaatggaataggtaagagaacccagaaataaaggcatatacctacaaccatgtgatcctcaacaaaactgacaagcaatgaagtaagaacttcattcaataagtggtgctggcataactggctagccatatgcaggatattgaaactggacccctatccttcacgatatacaaaaatcaactcaagatggattaaagacttaaatataaaacctaaaagtattaaattcctagaagaaaacccaggaaatgccattctggacataagtgctggaaaagacttaatgatgaacaccccaaagcaattgcaacaaaaacaaaaattgacaagtgggacctaattaaactaaataacttctgcacagcaaaagaagctatttgcagactacagaatgggagaaaatgtttacaaactgcatctgacaaagatctaatccagaatctataaagaactcaaacaaatcaacaatgagaaaaacaaccccattaaaaactgggcaaaggccatgaatagacctttctcaaaagaatacatacatgtggcaataagcatatgaaaaaaatggttaatatcgctaatcattaaggaaatgcaatcaaagccacaatgagataccatctcagacctgtctgaatgggtattatcagaatgggtattattaaaaaatcaaaacatagatgctagtgaggctgcagagaaaagcaaatacttatacactgctggtgggaatgtaaattaattcagccattgtggaaagcactgcagcgatttctcaaagacataaaagaacatagcattcaacccagcatcccattactgggtgtatacctaaaggaatataatcattccaccataaagacaaacacttgtatgttcattgcagcactattctcaatagcaaagatgtggaatcaacgtaaatgcccatcagcagtagaccagataaagaaaatttggtacatatacaccatggaatactatgcagccataaaaaagaacaagactgtgtcctttacagcaacatagatggagctgaggctcttatcctaagtgaattaatgcaggaacagaaaatgaaatatcccatgttctcacttataagtgggagctaaacattgattacacatggactcaaagaagggaacagtagacacgggcttatgggtggaggttgggaagaggatgaagattgaataactgcctgttgggtactatgctgattacctggggacaaaattaactgtacaccaaactcctgcaacatgcagttgacccatgtacacatactccttgaacctaaaataaaacatgaaaaaaagcaaa

SEQ ID NO: 134 - protein, 535 aa, Homo sapiens
MLCDEKAQKRRKRKAKESGMALPQGHLTFRDVAIEFSQAEWKCLDPAQRALYKDVMLENYRNLVSLGISLPDLNINSMLEQRREPWSGESEVKIAKNSDGRECIKGVNTGSSYALGSNAEDKPIKKQLGVSFHLHLSELELFPDERVINGCNQVENFINHSSSVSCLQEMSSSVKTPIFNRNDFDDSSFLPQEQKVHLREKPYECNEHSKVFRVSSSLTKHQVIHTVEKPYKCNSCGKVFSRNSHLAEHCRIHTGEKPYKCNVCGKVFSYNSNFARHQRIHTREKPYECNECGKVFSNNSYLARHQRIHAEEKPYKCNECGKGFSHKSSLANHWRIYTGEKPYKCDECGKAFYRIALLVRHQKIHTGEKPYKCNECGKVFIQNSHLAQHWRIHTGEKPYKCNECGKVFNQLSNLARHRRIHTGEKPYKCNECGKAFSEYSGLSAHLVIHTGEKPYKCSECGKAFRHKLSLTNHQRIHTGERPYKCNECGKVFNRIAHLARHRKIHTGEKPYKCNECGKAFSRISYLAQHWTIHMG

SEQ ID NO: 135 - DNA, 2024 bp, Homo sapiens
gtggtgcgagcgctgcaccagcccctggctggtggttactgtccgaacggcgtggtgtggtcgctgactctctgggcgtgcagctccgcagccctgccggctcggttcgattgacttacgcaggattctcagcccttgcctgggagaacagttcaggagacagatggccccaagagcccagatccagggaccgctgacatttggggatgtggctgtggcctttacccggattgagtggagacacctggatgctgctcagcgggccctgtacagggatgtgatgctggagaactatgggaatctggtgtctgtggggcttctctcttccaaaccaaaactaattactcagttggagcaaggggcagagccctggactgaggtgcgagaggctccatcaggcacacatgcagtcgaggattactggtttgaaacaaagatgtcagccctaaagcaaagcacttctgaagcatctgttctgggagagcgaacgaaaagtgtcatgatggaaaaaggcctggactgggagggcagaagctccacagagaagaactataagtgcaaggaatgtgggaaagtcttcaaatacaattcgtcctttattagccaccagagaaatcacaccagtgagaaaccacataaatgtaaagaatgtgggatcgcctttatgaacagttcatcccttttaaatcaccataaggttcatgcaggcaaacagccttatagatgtattgaatgtgggaagttcctgaagaagcactcaacgtttatcaaccatcagagaattcattctagggagaaaccccacaaatgcattgaatgtggaaaaactttcagaaagaactcaatccttttaagtcatcagagaattcatactggccagaaaccctacaaatgtaatgactgtgggaaagccttcgctcagaatgcagctcttactcgtcatgaaagaatacatagtggagagaagccttttaaatgtaacaagtgtgggagagctttcagggataattcaactgtgttggaacatcagaaaatccatactggtgagaagccatatcagtgtaatgaatgtggaaaagcctttaggaagagctcaactcttattagtcaccaaagaatgcatactggggagaaaccctatcactgcagtaaatgtggaaaatctttcaggtatagctcatcctttgctggtcatcagaaaactcacagtggaaataaaccgtatcagtgtcgtgactgtgggaaggcctttacaaagagctcaacccttactggacatcagagaattcatactggagaaaaaccctatcactgtaagaaatgtgggaaagcctttcggcacagctcaggccttgttgaacatcagagactccatactggggaaaaaccttataaatgtaatgaatgtgggaaagcttttccccgaagttcagcccttaagcaacataagaaaattcataataaagaaagagccatgaaatgtagttagtgtggcaaattgtgcagagtagtttattccttctgaccatcatagaggagacattaaataaattatgcatttaacagaaatactctgtacttctgagagaacacatcacttgtgaggatattcattgtgaggttctactagtgaaatatttgaagaaactaaatgtatgtcagtatggaagtagttatagcatactgtgtgctaattgaaaagaatgaggtggagctgtaaatactgtacaaagccaggcatggtggcatatgcctgtagtcccagttacttgggaggctgagacaggattgcttaagcccaggagtttgagtctgtaatgcactatgattgtgcatgtgaatagccactgcactccagcctgggcaacatagcaagactccatctctaagtaaaaaaatacaacagtagaaatatacccatgataatatacccaatatacccttgttaaagaagcaagtttcaggaaatctatattatatgcattcaaaaagacctggacaaataaagaccaatcttaacagca

SEQ ID NO: 136 - protein, 441 aa, Homo sapiens
MAPRAQIQGPLTFGDVAVAFTRIEWRHLDAAQRALYRDVMLENYGNLVSVGLLSSKPKLITQLEQGAEPWTEVREAPSGTHAVEDYWFETKMSALKQSTSEASVLGERTKSVMMEKGLDWEGRSSTEKNYKCKECGKVFKYNSSFISHQRNHTSEKPHKCKECGIAFMNSSSLLNHHKVHAGKQPYRCIECGKFLKKHSTFINHQRIHSREKPHKCIECGKTFRKNSILLSHQRIHTGQKPYKCNDCGKAFAQNAALTRHERIHSGEKPFKCNKCGRAFRDNSTVLEHQKIHTGEKPYQCNECGKAFRKSSTLISHQRMHTGEKPYHCSKCGKSFRYSSSFAGHQKTHSGNKPYQCRDCGKAFTKSSTLTGHQRIHTGEKPYHCKKCGKAFRHSSGLVEHQRLHTGEKPYKCNECGKAFPRSSALKQHKKIHNKERAMKCS

SEQ ID NO: 137 - DNA, 5315 bp, Homo sapiens
ctttcctttcctcggcgtccggcgggctcccgcggcggccaggcctgcgccgcccgccaacagggacgcgccgcggcggcgcctccatttgcccccgagccgagccgtggctttccggatgatcgggagacgcggtctggacgggccgggaaaggagccgggcgcctgcggagaccccgcctcagcgagtacgcccggccgggcgggctgggaggatgaggacggctgccctggacttccgccgccacaggagggttttcggccggacgccgggagggagctccaggctgtgagctccatttgtaaaggtcttaataacaagaacagtgacttcggctccggagcttcaagatagtggcctgcttggcctgcccatctcggatctctccaggaggacccagccacccaagggtcgtcttctgctgctgacccccatcaaatcccatcatgcccacagccctgtgcccccgagtcttggctccgaaggaaagtgaggagcccaggaaaatgaggagcccacctggagagaaccctagcccccagggggagcttcccagccccgagtcctctcggcgtctcttccgccgtttccgctaccaggaggcggcgggcccccgggaggccctgcagcgcctctgggacctgtgcgggggctggctgcggcctgagaggcacaccaaggagcagattctggagctgctggtgctggagcagttcctggccatcctgccccgggagatccagagctgggtgcgggcgcaggagcctgagagcggagagcaggctgtggccgcggtggaggcactggaacgggagcccgggagaccctggcagtggctcaagcactgtgaagaccctgtggtgattgatgatggggacagccctctggaccaggagcaggagcagctgccggtagagccccacagcgaccttgcaaagaaccaggatgcccagcccataaccctggcacagtgcctggggctcccaagcagaccaccaagccagctcagcggggacccagttctgcaagatgctttccttcttcaggaagagaatgtgcgggacacacagcaggtgaccaccctccagctacccccgagtcgggtttctccattcaaggacatgattttatgcttctctgaagaggattggtcccttctagatcctgcccagactggcttctatggagagttcatcattggggaggattacggggtctcaatgcctccaaacgacctagctgcccagccagatctctcccagggagaggagaatgagccacgcgttccagagttgcaggatctccagggcaaagaagtgccccaggtctcctacttggactctccaagtctccagccattccaggtagaagaaagaaggaaacgtgaggagctgcaggtgccagagttccaggcctgcccacagacggtggtgcctcaaaacacctacccagctggcggcaacccgcgatctctagagaacagcctggatgaagaagtgaccatcgagatcgttctctccagctctggggacgaggactcccagcatggcccgtactgcacagaagagctggggagccccacagagaagcagcgcagcctccccgcctcccaccggagcagcaccgaggccggaggcgaggtgcagacctccaagaagtcctacgtgtgtccgaactgtgggaaaatcttccgctggagggtcaacttcatccggcatctgcggagccgcagggagcaggagaagccgcacgagtgctcggtgtgcggggagctgttcagcgacagcgaggacctggatgggcacctagagagccacgaggcccagaagccttaccggtgtggtgcctgcgggaagagcttccgcctgaactcccacctgctctcccaccggcggatacacctgcagccggacagactccagccggtggagaagagagagcaggcggcatccgaggacgcggacaagggtcccaaagagccgctggaaaacggcaaggccaaactgagcttccagtgctgtgagtgtgggaaggccttccagcggcacgaccacctggctcggcaccgcagccactttcacctgaaggacaaagcccggcccttccagtgccggtactgcgtcaagagcttcacgcagaactatgacctcctccgccacgagcgcctgcacatgaagcgccgttccaagcaggctctgaactcctactgagcctctccgcctggggcggcctcaccctggctggtgctgccccctcaccttggtactgatcagcgcccccacccaggacataccttccccaggatagagagcacacctccctcctgtccttgctctcaggtagtgagcgttcgggtggtgccatgggagcactctccctcccccaggtaatgaaagagtggccaagtgagtgttctgtttctgctgtgccaaaaaacgggggggatgtgccatcaccaggttggacatgccaggtgttctgcgtcttagagacccttggcccatgctccccaagctcggggagtaaaactgggctatcccccgtcagggcggcaccctggtcaccagccaaacctcagtatactccctcccctccttccctgtctgaacgctaggatctgctcctgaagctccaggatgcctgcacttccactgagaagctgctggcggatgttggactagaggaaagaagaaggcagggtgggactgatgggctcagtggggagcagggccaggcacactgagccagacatgtcatgtctgagccccagattcgtggccatcaggtaggcaggagcaccccgcagatccaagatgatcaggcagcccttttgggctggcctctgtggcaggggtctgcagagctccttcttgaggtttggaaacagtcgtcatacctgttgattttcctgggggccaatcactagggatctggagctcaccaaaaacaaagcttacattttaatttgtgttgcacacctaccccataatgtctttataccccaaagatccttggtaaatgcttgtgggttggaagcggagttgtcatcgtttaaaaggcacttaagtcccttcttccaatctgtcctgtctaggaatgtggagctctgcccccagtgaggggttctcctgtctgggtgagccaagctccagaacagaaccttgcctgacaacacacttgatagatacattagcttggagtgctggtgtgtccaaacactggctggcttagaacaacaggagtgtattccctgacagttctgggaggtgcacgtccaagatcagggtgtcctcagagttggtgccttccgagagctgtgagggagaagcggcttcatgcctttgctggcagttgccattccttggtgtgtggaagcgtcacccagtctctgccttcatctccacatggcactcttgctgtgtgcgtgtctgtctccaaacctccctttgtttaaggacaccagtcatatcggattagagcccatcccaccgactccagtataacctcatctgtatccgcagcaaccgtttaccaataaggtcacattctgaggtactagaggttgggacttcaacatcggaatttgaaagggacagcattcagcccatgactccagataaacgtgaggtatgctatatcattcctaatttacagatgagtcaatacaaacttgagtgagcttgctcacaattccatcaaaggcagggttcagacccaagtttcagcatttagggcaggtgtcctctgcatggaagaatcatactcaatagccgtaaacgctgacaaattccccttcctccctgccttctgatgggggctgggcaggccagctggagctgtgtctcctgctgggattccggactgagagtgacagcaggtagtgaaacctcaagcaatttaaaacatggtattgttcctggaagactggttatgttggctagggtcagcaagagagggcatcaaggctgtagtctagcagtgatttaatctgcaagtcaaaccagacgggtattttgtattattcatatgtcacatcctaccaacagacagtaagtcaggcaaggctcctggtgctccttgtcactcacgtaattttcacatcaggaaaactctgggctgggtgcagtggctcacacctgtaatcctagcactttgggaaaccaaggtgggtggattgcctagctcagtgacaccagcctgggccacatggcaaaaccccgtctgtaccaaaaatgcaaaaaattagctgggtgtggtgttgacgtttgcggtcccagctactctggaggctgaggtgggaggattgcttgagtctgggaggcagaagttgcagtaagccgagatcatgccactgcacaagctaggtgacagaatgagactctgtctcaaaaataattaaaaagcctctgccccaaactcgttaaaagattttataaccacaactgctgtttctgtgtagatgcatctgcatgcccaggagcagtaaatgcaataaaatcatttggttatactttgaacacaaaataaacggttgaggcttttactttctaaatagtttgtctcttgtatcaacatagctggaaaagggagaaatccgatttttaaggccaagggaggggaaaattccaagtagaagccaggctctctgtacacgtttaccccacctacctgtgtgctcctacctgtgctgaggattctctctgtagctctaaggtcttgggaaggttattcaccttcctgcttcagacgtctgactcaagagaagaacactgttctacttaccagagtgtttttctgtgtaaaaccacatcatgaaggagaaagcgacaaagggaatgtgaggggctggaagccacagggaggctgtctcttgagtccccaccactgatccagagccaaccaaggcacctcaggaaatggaaggccacattgcctctggatttggaaatcctcctgggtaatgtaactgaaacccaggttgatgccatgcagcaggagcagcagggggaacgtgctctcaggagaggtcggccaaccctccagcccaacacccttcaccacagtggtggaggaggctgcacccaggagatctttgtctcccttttggccactgatacctttggccttatctgacaacagctacccctcgatccttccctcccaccccaggggctgggcagctggctggagctttgtgtccaccttgctctggaggttgagacccccatctgagcaacatcctctctctttgttcctctgatcccttggcatcgtcacaaacccacaggtgcataataaaaacttgctgagtcaa

SEQ ID NO: 138 - protein, 587 aa, Homo sapiens
MPTALCPRVLAPKESEEPRKMRSPPGENPSPQGELPSPESSRRLFRRFRYQEAAGPREALQRLWDLCGGWLRPERHTKEQILELLVLEQFLAILPREIQSWVRAQEPESGEQAVAAVEALEREPGRPWQWLKHCEDPVVIDDGDSPLDQEQEQLPVEPHSDLAKNQDAQPITLAQCLGLPSRPPSQLSGDPVLQDAFLLQEENVRDTQQVTTLQLPPSRVSPFKDMILCFSEEDWSLLDPAQTGFYGEFIIGEDYGVSMPPNDLAAQPDLSQGEENEPRVPELQDLQGKEVPQVSYLDSPSLQPFQVEERRKREELQVPEFQACPQTVVPQNTYPAGGNPRSLENSLDEEVTIEIVLSSSGDEDSQHGPYCTEELGSPTEKQRSLPASHRSSTEAGGEVQTSKKSYVCPNCGKIFRWRVNFIRHLRSRREQEKPHECSVCGELFSDSEDLDGHLESHEAQKPYRCGACGKSFRLNSHLLSHRRIHLQPDRLQPVEKREQAASEDADKGPKEPLENGKAKLSFQCCECGKAFQRHDHLARHRSHFHLKDKARPFQCRYCVKSFTQNYDLLRHERLHMKRRSKQALNSY

SEQ ID NO: 139 - DNA, 5824 bp, Homo sapiens
acggcctggtttgcacccctggtttagggtcttcggccccggctctggcgtccctggctgccaagcctgaggcccgcagtcctactcccgccgagacccgccgctccggtcctgccccgaactgcccacggccggcagcgcttccaggccctgaaaaaaactctcttcctgtgtctggccagaggtatagagagagacaggttcaactctaaggcctgaaaaggaacaaggcccaccggaagcaatggccactgtccctggcctccagcccctgccaaccttggagcaggacctggaacaggaagagatcctgattgtgaaggtggaggaggacttctgcttggaagaggagccctccgtggagacggaggaccccagccctgagactttccgccagctcttccggctcttctgctaccaggaggtggctgggccccgggaggccctgagccgcctctgggagctgtgctgccgctggctgcggccggagctgcgcaccaaggagcagatcctggagctgctggtgctggagcagttcctgactgtgctgccgggggagatccaggctcgggtacgcgagcagcagccggagagcggtgaggaggccgtggtccttgtggaagggctgcagcggaagcccaggaaacacaggcagcggggctcagagctgctttctgatgacgaggtgcccctcgggatagggggacagttcttaaaacaccaggcagaggctcagccagaggatctgtccctggaggaagaggctcgattctccagccagcagcccccagcccagctgagccacaggccacagaggggcccgctgttgtggccagagagaggccctccagctccccggcatcaggagatggcgtcagcctcgcccttcctttcggcctggtcccaggtgcccgtgaacttggaggacgtggctgtatacctttctggggaggagccaagatgcatggacccagctcagcgggacgcgccgctggagaatgaaggacctgggatccagttggaggacggcggtgatggcagggaggatgccccgttgagaatggagtggtaccgagtgctctcggcacgatgccaggggcctggccacccgctcccaggtcagaggccagccccagtcaggggcttggtcaggcctgatcagccaagaggcggccccccaccaggaagacgggcttcccatggggctgacaagccgtacacctgccccgaatgtggcaaaggcttcagcaagacgtcccacttgaccaagcaccagcgcacacacacgggcgagcggccttacaagtgcctagtctgtgggaagggctttagcgaccgctccaacttcagcacgcaccagagggtgcacacaggcgagaagccctacccgtgccccgagtgtgggaagcgcttcagccagagctccagcctggtcatccaccgcaggacacacagcggggagcggccctatgcctgcacccagtgcgggaagcgcttcaacaacagctcgcacttcagcgcccaccgccggacgcacacaggtgagaagccctacacctgcccggcctgtggccggggcttccgccggggcaccgacctgcacaagcaccagcggacccacatgggggcaggctccttgccgacgctccagccggtggctcctggaggccccggtgccaaagcctgatcaccaggcctgaaactccctttccaggactctcatccctgggcacagaattcaggaaactgctagacagcctggtccgaaagcattgccagctgcccgtttcctcccatggcccagtatgaggccagcaggggacatttgggatgcccaggccgcagaggaagctgggcactgggtgcagaacaagggcaaggacaggctctgagtgtccagtggcagccagaacaggtgacacagagcaggggcttcagccacagagacacactcaggaggccagaagccgacactcaaggtgttcgtggggctggctcctgaagggcctgggagggtccatcagctgcctccagcatccagtggctgctggcatacagcctcatccccacgtcccaacccctctcctgtgtgtctgtgaccctgtgcgctgtctctgtgtgtaccccccacctgctcccccccccttttttttttgagacggggccttgctgtgtcccccaggcgggaatacagtgccatgatcatagctcactgcagcctcgaatccctgggctcaagtgttcctcctgcctcatcctcctgagtagctggggttacaggtgtgtgccgccatgcccagtctcttttttggtagggccaccactcactgggtttagggtcccccaatacactgtgacctcatcttaactaattatatcatcaaaacccgtgtttccaaataaggtcacattctgaggtctgggtgcacatgaatttgagggacccctcgtctgctgcagggagccctgctgtaccccagccttcccaggacgtggtctccagcttcttcatcctgccagagtttccaaatggagcccggggctctgcagcattccagtcccctttgcagatccatagctgctctgcagggcggaagacacctggggcgggaaagcacccctgagttccatcttcctgacatgttgcctgggatgtgacgggcctgacatctccccagggccggggcccagggctgcgtttgctcctggccccttagtgtctggaatgtggccttccacggttgccccactttgtctttctaaggtaagaagccttcaccttccagcttttgtctggcctgtgctgcgtgggagccactggtctgtgcacatccacggtgggtgagtggccaagacaagcagtgtgatagagtccttggtgggtttagtcatctcggaagtcgtagggcagctatggaaaccactgggttctggaacgttccagccaggcagtggttgttcctcataggtaggtggccttggccttcatcccagcctgggatgctccattgcatttgtcacctagtcactgtatatacgtgcacatttgaccttttggcacagcccaggttccaggtgcgtgacctgccctttttctcattcccttaactgacattatttagtgtcagaggccgagcacagtggctcccacctataatcctagcactttgggaggccaacgcgggtggattgcttgagcccaggagttcaagagcagcctgggcaatatagaaagacctcttccctaccaaaaaaaaaaaaaaaaaaaaaaagccaggtgcagtggctcacgcttgtaatcccagcactttgggaggccgaggcaggtggatcacaaggtcaggagatcgagaccatcctggccaacatggtgaaaccccatctctactaaaaacacaaaaattagctaggcatggtggcgtggcacgtgcctgtagtcccagctactcgggaagctgaggcaagagaatcacttgaaccagggaggcggaggttgcagtgagccgaggtcgcaccgttgtactccagcctggtgatagaacgagactccacacaaaaaaaaaaaaaattagccaggcatgatggggtgtgcctgtagtcccagctacttgagaggctgaggctggaggatcacttgagcccaggaagttgaggctgcagtgagctgtgattgtgccactgcactcatcctggaagacagagtgagatcctgtctcagataaaataaacaattttttttttaagtcattgcttctggcccctgtgtgctctgtcctgtgtctgcagaatggggctgcctggttgagggacggcttttaccttctagactagctctgggatctctcatggggcatgaggtacccagctagatgtggccaggccacactccaggagctagcaaagcacccagcgttgctgacacccatctccccagcgcagcctgagcccccaggcccctctctcatatccaggcctgtgctggaggtggcggcctctgggggagtgtggttggggtctgcccacttccctccccctgccgaggctgtggcctcccactggctgctgcttggccccatctcatggtcgctgcctgctgcttggccccatctcatgggcgtcatcctcagcactcacgtgatgggagagttttgtaggagctgtgagtcccaggtgcctgcgtgtgctgtgatgttatctcatgcagtccagtgaggggggactcccattagtctcctttttttgttttgttttgagacacagtctcacttcattacccaggctggagtgcaaggcacgatcttggctcaccacaacctccacctcccaggttcaagtgattctcctgcctcagcctcctgagtagctgggattacaggtgcgcaccactacgcctggctaatttttgtatttttagtagagatggggtttctccatgttggtcaggctggtcttgaactcccgaccttgtgatccacccacctcggcctcccaaagtgctgggattacaggcgtgagccaccgcgcccggccatgattctccttctgtgggtggaggaactgggcactgggagcgtgaaaaccttgcccaggtggcagagccagctttggacgcaggtctgacttcctacctcactccccttgccttgacagacacagtaattcagagttgaacttggaacagagtttattttccatcactgtaaaacattctcagtgaggttactggcattaaaaaggtgggagaaatggaagaaaatggggttgaagaaaaaaaaagcctttgctcttgacagctaggcagccacagcggaggccgccaggctgcgagggcagcgtatgggggcagagcccggttctggcggcacaggccccggagtggagggggcaggggagggtctctgtaggtgggagagggcctgggggctgggaggcagcctggccttgtgccctacaggagggacctcctgggactttatggaagcctgtcttgcctttgacttgcaatgaaaatgcccctcatcattgggagtggggtcgggtgggggtccccagtggccagatcacgtggggtccagagagcagacatctgtagccctgatcttggcggccagtgaccacggccaagcagggcctgtcttttgcctggtacaaggcttgatgagaagagacccctgcccatcctcagtggcctggcagccaggggtgaaccccaggggaagctgggacactgtcccaaaggcccggcgccctactgtgctgcctgagcccgtggcaccgtggggcccaaggtggtgatgatttctctgctcttcccacggggcagacagcaggacacatcctggagacaaggttggggagacaaacaggtgcccaggtcagggctgatcacagcagttacaaaagcatcccgtgaagacggggctgcaagacggtgctggcaaaggaacaggacccaggaagaccaggcttgtcctgtggaggggccgggtcttggcagggggcaagcagatgtccccagtttttgctggtgatcaacaagtgaggccgctgctccattctacacaggacagcatttccaggggtttccagtattctgtctagattcataaaggtcaaaggccttgagaatctatgtgtgcctttctatcttaggtaaagaagagaaagagaaagcaaattctcgttactcctctttcaaaaagttcattaaaagccaggctggcagctcacagtgctataatcccagcactgtggaaggcctaggcaggaggattgagaggagttccagaccaacctgggcaacaccgtgagaccccatctctac

SEQ ID NO: 140 - protein, 480 aa, Homo sapiens
MATVPGLQPLPTLEQDLEQEEILIVKVEEDFCLEEEPSVETEDPSPETFRQLFRLFCYQEVAGPREALSRLWELCCRWLRPELRTKEQILELLVLEQFLTVLPGEIQARVREQQPESGEEAVVLVEGLQRKPRKHRQRGSELLSDDEVPLGIGGQFLKHQAEAQPEDLSLEEEARFSSQQPPAQLSHRPQRGPLLWPERGPPAPRHQEMASASPFLSAWSQVPVNLEDVAVYLSGEEPRCMDPAQRDAPLENEGPGIQLEDGGDGREDAPLRMEWYRVLSARCQGPGHPLPGQRPAPVRGLVRPDQPRGGPPPGRRASHGADKPYTCPECGKGFSKTSHLTKHQRTHTGERPYKCLVCGKGFSDRSNFSTHQRVHTGEKPYPCPECGKRFSQSSSLVIHRRTHSGERPYACTQCGKRFNNSSHFSAHRRTHTGEKPYTCPACGRGFRRGTDLHKHQRTHMGAGSLPTLQPVAPGGPGAKA

SEQ ID NO: 141 - DNA, 6189 bp, Homo sapiens
agcttcgccgcgccagcaccccgccaccggcgctggctctgaagggccccggcggcggccgcgtctgcgcaagctcgggacggcctcgggaggcggggctggcgcggggcggacgcgggggctggcgcggggcggacgcgggggctggcgcggggcggacgcgggggctggcgcggggtggcgggcgggggctggcgcggggtggcgggcgggggctggcgcggggtggcgggcgggggctggcgcggggtggcgggcggggcctggtcctgtgagcgttcggagactgcgggcgcgcagacctgtactgggcccgcgccccggccccttacagagctgggtgtgtccctccgagtgccccccgctagggactgtgcaggccggagctaggcagggacagcggggcgaaccgggctgatagagtcggtccctgctcctgtgaggctctcaccgaatccctgctgtttccgggcagctgaagagcgctgggccctcgcgtcgcgggcgtggctgtggccgtgtctcctggtagtctgagcccactgtgcgtgtggatccacgtgggagctgggttccagagcctggtcctgaggaggagccgagccggggcttccccttctcagaatcctgctcttcctccagagagattcccaggagaagagggaacaaccaattcattcctgaaagccaggcctcgggacctgatgacatttgaagatgtggctgtggaattcagccagtgggagtgggggcagctgaaccctgctcagaaggacctctacagggaggtgatgctggagaacttcaggaacttggccattctgggccttctagtatccaaaccatatgtgatctgccagttggaggaagggggtgagcccttcatggtggagagagaaatctcaacaggagcccactcagactggaagagaaggtctaaatccaaggaatcaatgccaagttggggaatttccaaagaagaattattccaggtagtatcagtggaaaaacacattcaagatgtgctgcagttctcgaagttgaaagcagcctgcggttgtgatggccagttagagatgcagcagataaaacaggagagacacctgaaacaaatgtcaaccattcacaaatctgccaccacccttagcagagattataaatggaatggatttgggagaagcttaggtttaagatcagtccttgttaaccaacacagcattctcatgggagaaggatcttataaatgtgatacagaattcaggcagactttagggggaaacaactctcagagaacccacccagaaaagaaatcttgtaaatgtaatgagtgtgggaagtcctttcacttccagtcagaacttaggcgccatcagcgatgtcacactggagaaaagccgtatgaatgcagtgactgtggaagagcctttggtcatatttcatcccttattaaacatcaaagaactcatactggagaaaagccctatgaatgcagtgaatgtgggagagccttcagccagagttcgtctcttgttctgcactatagatttcacactggagagaaaccctacaaatgtaatgaatgtggacgagcctttggtcacacttcatcccttattaagcatcagaggactcatactggagaaaagccctatgaatgccgggaatgtgggagaaccttcagccagagctcatcactcattgtgcattacagatttcatactggagagaaaccttacaaatgtaataaatgtgggagagccttcagccagagttcatctctcactcaacattacagatttcacactggagagaaaccctacaaatgtaatgagtgtggaagggcctttgctcatactgcatcccttattaaacatcagagaagtcatgctggaaaaaaaaccctataaattcagtgaatatagaagggctttcagctggagtgcagacatcactggaacttaaagaattcatatcagagagagatcctaaaggtgtaatgtatgtgggaagaccacatcttgttccacatcaggcaataattactaaagagaatccctgtcaatgtcaagagggggtgggcttcccctctcttaccaaacatgggagaatccatactagtgagaaaccacgtgaatgtaatgaatgtgggaacgctttgatcagaggatgcatattattcagcatcagacagccgacactggggaggagccttatcaatgcagtgagtgtggcaagccttcagttacatactgattctttaagaaaatcagataacttgtactggagagaaatcctacaagtgtggtaagtatggaaaaatcttcagttgtatctcttcctttactaagcatcaagaacacatactagagagaggccctatgaaagcaggaaatagaggaaggccttcagtcagggctcatcccttattaagcatcagaaaattcatacctgagaaaaacctgtgaatgtgggtaatgtgggagagccttcagccaaacctcattgctttataaaccccttagaactctccctactagctggaaactctggtgacgtgatgaatgtgggaagggctttggtggatgttccaccaaaacacgttagagaatttgtacattagagaatttgtgctagagcaactcttcaaatttagtgaaactgggaaaacccattagtagagttcaagcttcagtattcatctcaaagagaaaccttgggaacatgatgaatgtgaggaaagttcctttccaacttgagatgtataaaactagagctgaaaagaagctgagaaatcaccttgtctggtgattttctgcctggtggggccatttgtataacgacacttgtgcattgcctcctcatgctgttactgacggggcagggtgtcatgcatgggtgcagaggatggaggctgagaaaggtagacagctacccatgatctagcccagtcgtattttagagctaataaaactgatgttcagaaagtgacatgccttggcctatagtcctaactgggctgggcctctttcctgtggttcacagctgtagtatggagattaatagactggatctttgcagtacaacacctctatgcacttctttctctgtagcacatgttacctttctttgtgaggcaatggagtggtctaggattgagcaaaaagcaatttttgttacatctttatgctaatagatttggaatttttgaaatgaaatgaaaccttgtttaaacattaaaattactaaaataggctgggcgcggtggctcacgcctgtaacctcagcactttgggaggccgaggcggacagatcacgaggtcaggagttcgagaccatcctggctaacacagtgaaaccctgtctctcctaaaaatacaaaaaaattagccaggcatggtggcgggcgcctgtagtcccagctacttggaaggctgagacaggagaatggcgtgaatcggggaggcagagcttgcagtcagccgagatcacgccactgcactccagcctgggagacagagtgagactccgtctcagaaaaaaaaaaaaaaaacaactaaaatatgggtattatgcacaatccagatctcaaaaacgtgattctaagtgaaagaaggcagatgccagagaccaggtattttctagtaccattttaggaaatgtccagaaatggcagatcttcagaaacaaagtaactgcaaatgttacaaggaatctttttagggtgacgaaaatgttctaaaactagatggtggtgatggttgaacgatttggtaacttcactaaaaatcattgaattgttcactttatatgggcagattttatggtaaatatacctcaataaaatcatttttcaaaatcaaatttacacatataccaaccattgctaaacaagtattcctgttttgtttgttacttcaagccatctatgcatttttggtatcactttttattttctgtaacagttacccctacatttactgggtctcagaaccttgtcaggctctgctttaaagttcctaccatgttggctctgtaactcaggtggagaagcctagaccaggagctggcgtagaccaaaggatacttgcctaataaggattagcttatactgaggaaaatactttaagcatttaaagtccagatgaggaagttgagcccagaattcagggaaccagctcaaagtgggcccatgcagacaggctgggtctaagagtccacaaggttggccagggcaggtaggatgcacaggaggcatctggatctggaagtacttggacagctgaggtcaagatcacacagaaatttattcctggacagccaaggtttacaggagcagaaatagcaaatattttcttgctccgtctctcccttttttcccagtgcccttttctgtacctacccagatcactttatacctagacatctgtcacaattttgtaactggtcttcgtccaaaatctgtctcctcttctcatgtatccttgccatattaaccatacttaccagtttgaacccagtgtcctgccctccaaaaatcctttgcacggcctacaagataaatcctcaccccccgtgtgtggtatataatgccctctttaggctgctccaacctcctgctgctcctgacagaagcctccattgcacacaaatgctctcttgtcatccctcagacatgcctttccacatctcagcctgcaaacctttaccttagctgttctatcagccgggggcaccttctctacttacctaaagcctacataatcagtcagaaacctgtgtaaatttcccttccttggagaggtgttctcttgaaaactgatatgaagtcatatcttaccatttgtaatcataaacatatttgtttgtgtaagtttttaaaaatggacaatatctagacttgtggtaaatcgtatcactgtcttgatctatttaaataattttttatcactttaccactttcttgtttcctgaaccagatgacaatggaaaaagtcaaatggtaaaatattttaagagatttattctgagataaatatgagtgacctgtaggcacagttgaccagcatttgccttaaaacagagaccttaagactaacaaaaacagactctttgtagcaataacaacatgacagtaagtcctgagagaaatcaaagtgttttacgccaaaatagatttaagtctgataagaaacaagtctgacacagccccaggagatcctgagaacatgtgcccaaggtggctcttgtcaggagcagcagcaggttggggcagcctaaagaggacattaccaaacacgggagtgaggatttatcttgtaggaagtgcaaaggatttttggagggcaggacactgggttcaaactgacgagtatggttaacatggcaaaggtacgtgagaggaagagacaattgtgctgtcaggctacagcttggtttcatgcatttttacattttaggggaatgtaagacatcaatacatgtaagatttacattggttcgatggagaaaggcaggacaacttgaagctggtggggaagggacagggacagagggagggccttctgggttataggtggattcaaagattttctgattggcagtgggtttatccaaagacctggaatcaatagaagggaatgtctgggttaagataaggtgttgtggagaccaaggttcttactgtgagatgaagccagaaggtagcaggcttcagagagaatagattgtaaatgtttcttatcagacttaagagaaatttattttaggataaaatacttagatttctctcagggcctgttatctgtcatgttatcttattgctacaaagagcctgtttttgtcagtcttaaggtctctgttttaatgttaatgctggtccactgtgcctgaattccaaagagaggaaggtataatgaggtatgtctgaccacccattcccatcatggcctgagctagtgtttcaggtttactttagaatgctcttggccaagtggaagggtcgattcagttggttgtgtgcttagaattttatttttgacttacatagactatcagctgcttcatgtcacatctcatgcttctcttatgttgcccagttttctcagtgcttccgactgcatgtttttgtactatatgaaaagccttctttctagaagactaccaattaaatatttctttagaaaaatgtaa

SEQ ID NO: 142 - protein, 400 aa, Homo sapiens
MTFEDVAVEFSQWEWGQLNPAQKDLYREVMLENFRNLAILGLLVSKPYVICQLEEGGEPFMVEREISTGAHSDWKRRSKSKESMPSWGISKEELFQVVSVEKHIQDVLQFSKLKAACGCDGQLEMQQIKQERHLKQMSTIHKSATTLSRDYKWNGFGRSLGLRSVLVNQHSILMGEGSYKCDTEFRQTLGGNNSQRTHPEKKSCKCNECGKSFHFQSELRRHQRCHTGEKPYECSDCGRAFGHISSLIKHQRTHTGEKPYECSECGRAFSQSSSLVLHYRFHTGEKPYKCNECGRAFGHTSSLIKHQRTHTGEKPYECRECGRTFSQSSSLIVHYRFHTGEKPYKCNKCGRAFSQSSSLTQHYRFHTGEKPYKCNECGRAFAHTASLIKHQRSHAGKKTL

SEQ ID NO: 143 - DNA, 3238 bp, Homo sapiens
ccccgcgctgtctcggcggcccaggaattcactgtctgtagcatctgctcctccacagagggaccctggaatggcgatggcactcccgatgcctggacctcaggaggcggttgtgttcgaggatgtggctgtgtacttcacaaggatagagtggagttgcctggcccccgaccagcaggcactctacagggacgtgatgctggagaactatgggaacctggcctcactaggctttcttgttgccaaaccagcactgatctccctattggagcaaggagaggagccgggggccttgattctgcaggtggctgaacagagcgtggccaaagccagcctgtgcacagattccaggatggaggctgggatcatggagtctcctctgcagagaaagctctccaggcaggcaggactgccgggcaccgtgtgggggtgcctcccctgggggcaccctgtgggggggcaccctgcaccaccccacccgcatggcggtcctgaggacgggtcagataaacccacccacccccgggctcgggagcacagcgcctccccaagggttctgcaggaagacctgggccggcctgtggggagctcagccccccgctacaggtgcgtgtgcggcaaggcgttcagatacaactcgctgcttctcaggcaccagatcatccacaccggcgccaagcccttccagtgcacagagtgcgggaaggccttcaagcaaagctccatcctgctgcggcaccagctgatccacactgaggagaagccgttccagtgcggcgagtgcgggaaggccttccggcagagcacgcagctggctgcccaccaccgcgtccacacccgcgagcggccctacgcatgcggcgagtgcggcaaggccttcagccgcagctcccggctgctgcagcaccagaagttccacaccggggagaagcccttcgcgtgcacagagtgcggcaaggcgttctgccgcaggttcaccctcaacgagcacggccgcatccacagcggggagcggccctaccggtgcctgcggtgtgggcagcgcttcatccgagggtcctcgctcctgaagcaccaccggctgcacgcgcaggagggtgcccaggacggcggcgtggggcagggcgccctgctcggagctgcgcagaggccccaggcgggggacccgccccacgagtgcccggtgtgcgggaggccgttccgacacaactccctgctgctgctgcacctgcgcctacacacgggcgagaagccgttcgagtgcgcggagtgcggcaaggccttcggtcgcaagtccaacctcactctgcaccagaagatccacaccaaggagaagcccttcgcgtgcaccgagtgcggcaaggcgttccgcaggagctacacgctgaacgagcactaccggctccacagcggcgagaggccataccggtgccgcgcctgcgggagggcctgcagccggctgtccaccctcatccagcaccagaaggtgcacggccgcgagcccggggaggacacagagggcaggcgggcgccctgttgggcttcctgatgacggggacgacaggccgaggattcacgctggaagcccacccaagccggcggggccctagcgcagaaattcagaaccccctgtcctgaaggtgaagcaaagtctaaagaaagggccagctcccatcaggagctcggcttcttgctccagccgggcactggggagggaaagggcaccaggcagcccgtggtgtggcctcaggaaccactatcagccaccatttcctggggccttccggaaatgtccaggagcgggcagaagggagagagggaggggcagctatgctcagtccccaaagagcagggcacagggggcgccacagacgcatatgcagctgagctccccacaggccggcccgggtcttcgtgcagaaccattgggcacagccaggccttagcgccaggctccgtgtggcggtcaattccaggtgctgtaaagccgactaacagggtacagggagccttagctggctgccatgtctcctgcctgtaatcccatcactttgggaggctgaggtgggaggtttgcttaagcccaggagtttgagaccagcttgggcaacatggtgaaacttctctacaaaaaatttaaaaataagtcaggtatcgtggtctgtgcctgtacgctgtagtcccagctactcaggaggctgaggtgggaggatgggttgagcctgggaagtcaaggctgcagtgagctatgatagcaccacggcactccaacctggttgacagagtgacaccctgtttaaaaaaaaaaagcctagatggctggtggagctctatctatctatctatctatctatctctttttttgaggcaggatctctctgtcagccagcctggagtgcaatggcacaatcatggcttactgcagcctccagctcccaggctcaagcgtttctcccaccttagcctcctgagtagctgggactaaggcacacacactgtacttggcagctggcgaagcattgtttctgagtgtgtgaggatgttttcagtggactcagtgaagatctgccctcagcgtgggcaggcacatccacttggttggggacccagatggaacacaaagggagaagacaagcaaattctcttttctggagggagacacccatctcctgcccttggacatcaggactccaggttcttcggcctttggactcaggcttgccacagaggcctcccagggctctcggccagtcagcctcagaatgagagttacaccactggcttccttggttcaaccaccttcttacctggactgagcctcacttacagcttctctaggtctccagcttgcagacagcctatgggaggacttctcagcctccataagtgtgtgggccagttcgcctaataaatcccctctcctggccgggcgcggtagctctcccctgtaatctcagcattttgggaggcagaggtaggtggatcacctgaggtcaggagttcaagaccagcctggccaacatggtgagacccccgtctctactaaaagtacaaaaagtagctgggtgtggtgctgggtgcctgtaatcccagctactcgggaggctgaagcaggagaatcacttcaacctgggaggtagaggttgcagtgagccgagatcgagccactgcactccagcctgggtgacagggcaagactctgtctcaaacaaataaaaatcccctctcctaaactcca

SEQ ID NO: 144 - protein, 492 aa, Homo sapiens
MAMALPMPGPQEAVVFEDVAVYFTRIEWSCLAPDQQALYRDVMLENYGNLASLGFLVAKPALISLLEQGEEPGALILQVAEQSVAKASLCTDSRMEAGIMESPLQRKLSRQAGLPGTVWGCLPWGHPVGGHPAPPHPHGGPEDGSDKPTHPRAREHSASPRVLQEDLGRPVGSSAPRYRCVCGKAFRYNSLLLRHQIIHTGAKPFQCTECGKAFKQSSILLRHQLIHTEEKPFQCGECGKAFRQSTQLAAHHRVHTRERPYACGECGKAFSRSSRLLQHQKFHTGEKPFACTECGKAFCRRFTLNEHGRIHSGERPYRCLRCGQRFIRGSSLLKHHRLHAQEGAQDGGVGQGALLGAAQRPQAGDPPHECPVCGRPFRHNSLLLLHLRLHTGEKPFECAECGKAFGRKSNLTLHQKIHTKEKPFACTECGKAFRRSYTLNEHYRLHSGERPYRCRACGRACSRLSTLIQHQKVHGREPGEDTEGRRAPCWAS

SEQ ID NO: 145 - DNA, 6133 bp, Homo sapiens
agacgcgcgcaaacccggaagcagatcgcgtggagtgaaggtccctcagcggcgcgattgacatctaaagactcttggtacatgaggaagaaacccggaaaaggaaagcagaggagtcagggatggctcttcctcagggtctattgacattcagggatgtggccatagaattctctcaggaggagtggaaatgcctggaccctgctcagaggactctatacagggacgtgatgctggagaattataggaacctggtctccctgggtatctcttccaaatgcacaatgaaggagttctcatcaacagcacaaggcaatacagaagtgatccacacagggacattgcaaagacatgaacgtcatcacattggagatttttccttccaggaaattgagaaagatattcataactttgagtttcagtggcaagaagatgaaagaaatggccatgaagcacccatgacaaaaatcaaaaaattgatgggtagtacagagcaatatgatcacaggcatgctggaaacaagcctattaaatatcagcttggatcaagctttcattcacatctgtctgaactccacatatttcagcccaaagggaaaattaataatcaagtggagaagtctatcaacgatgcttcctcggtttcaacagcccaaagaatttcttgtaggcccaaaacccatatatctaataactatggggataattttctgaattattcattactcacacaaagacaggaagtacgcatgagagaaaaatctttccaatgtattgagagtggcaaagcctttaattatagctcactcttaaggaaacatcagattattcatctaggagagaaacaatataaatgtgatgtatgtgacaaggtctttattcggaagcgataccttgcacgccatcgtagatgtcacactggtgagaaaccttacaagtgtaatgagtgtggcaagtccttcagtcagatgtcatcccttacatatcatcatcgacttcatactggagagaaaccttacaaatgtgaagaatgtgacaaagctttcagacacaattcagcccttcaaagacataggagaattcatactggagagaaaccacataagtgtaatgagtgtggcaagacctttagtcagaagtcataccttgcatgccatcgtagcattcatactggaaagaaaccttacgaatgtgaagaatgtgacaaagctttcagtttcaaatcaaaccttgaaagtcataggataactcatactggagagaaaccatacaagtgtaatgattgtggcaagaccttcagtcatatgtcaacccttacatgccatcgtagacttcatactggagagaaaccttacaagtgtgaagaatgtgatgaagctttccgtttcaaatcaagtcttgaaagacataggagaattcataatggagagaaactgtacaaatgtaatgagtgtggcaagaccttcagtcaggagttatcccttacctgccattgtagacttcatagtggagagaaaccttgcaagtgtggagaatgtgacaaggcttacagtttcaaataaaatcttgaaatacgtcagaaaattcatactggagagaaatgttataagtgtaatgattgtggcaagatcttcagtcatacgtcatccattgtataccatcataaatttcatagtggagagaaaccttacaaatgtgaagaatgtgatgaagctttcagtttcaaatcaaaccttgaaagacataggagaattcacactggtgagaaaccttacaggtgtaataggtgtggcaagaccttcagtcatacatcatcccttacatgccatcatagacttcatactggagagaaaccttacaaatgtgaagaatgtgatgaaactttcagatacaaatcaaatcttgaaagacataggagaattcataatggagagaaaccgtacaagtgtaatgagtgtggcaagaccttcagtcagaagtcatgccttacacgccatcatagacttcatactggaaataaatcttataagtgtaatgagtgtggcaagaccttcagtaaggagttaacacatgccatcatagacgtcatactggagagaaaccttagaagtgcaatgagtgtggcaaaacctttcataggcagtcagcgcttatttaccatcaagcaatccatggcagagggaaactttacaaatgtaatgattgtcaccacgtcttcagtaatgctacaactattgcaaatcattggagaatccataataaagagagaccttacaagtgtgataaatgtgacaaatttttcagacatcgttcataccttgcagttcacgggcgaactcatgctggagagaaaccttacaaatgtgaagaatgtgataaagctttcagattcaaatcaaaccttgaaagtcataggagaattcatactagagagaaaccttacaagtgtaatgagtgtggtaagatgttcagtcaaaattcggcccttgtaattcataaggcaattcatactggagagaaaccttacaagtgtaatgaatgtggcaaggtttttaatcgcaaagcaaagcttgcatgtcatcatagacttcatactggagagaacgcttgcaagtgtaataaatgtggcgaggtttttaatcaacaagcacaccttgcacgtcatcatagaactcatactggagagaaacattacaagtgtaatgagtgtggcaagacctactctcacaattcagtccttgtaattcataagacaattcacactggggagaaaccttacaagtgtaatgagtgtggcaaaaccttccatcacaattcagtccttgtaattcataaaacaattcatactggagagaaacaagcgtaatgaatgtggcgaggttttcaatcaacaagcacacgttgcacgtcatcatagaattcatactggagagaaaccttagaaatgtgaagaatgtgacaaagtttacagtcgcaaatcaaacctcgaaagacaggagaattcatactggagagaaaccataaaaatgtaagagtttttgacaaggctttcggacgtgattcacacctggcacaacatcccagagttcacactggagagaaaccttacaagtgtaatgagtgtgtcaaagcctttagtgggcagtcaacacttattcaccatcaggcaatccgtagtgtagggaaacttgactaacgtaatgattctcacaacgtcttcagtaatgctacaaccattgtaaatcactggagaagccataatgaagagagatcttacaaatgtaataattgtggcaaatttttcagacatcgttcatacattgccgttcattggcgaactcatgctggagagaaatcttacaatgtcatgattgtggcaaggtcttcagtcaagcttcatcttttgcaaaacaggagaattcatacaggagagaaacctcacaagtgtgatgatcgtggcaaagcctttacttcacattctcacctcattagacatcagagaatccatactggacagaaatcttacaaatgtcatcagtgtggcaaggtcttcagtccgacttcactccttgcagaatatcagaaaattcatttttcaggtaattgttcccaatgcaatgaatatagcaaaccatcaagcattgattgacattagagtcagttcagcattgacttgagtttgagttgacttaacattgagttcaagccttaattgacattaaagtgtttatgttaagaggactgggctgtgtggcatggctcacgcctgtaatcccagcactttggtaggccaaggtgggtaaatcacttgaggtcaggagtttgagatcagcctggacaacagacctgagccacttttcccagcctgttttttgtttctttaacaaaaactgatagggatttttatgggtatcgtattgaatctagattacattgggttatataatcatttaacatattaatttttccaaaccatcaatatgggttgtgtctctatatatgtttttaatcattttgatcaatttttgttgatttcaaggtacaaacgtctcacctttttacgtttattcctaagtatttcttattttaagttctccagcaaatggaagtgtgttaaaattttcttttaaaattgtttattattaaaatatggaaattcaactaatttttggtgctgatactgtattgtgcaaatccactgaatatgtttgttagttccagtactattttggttgagtctgtgattttctacacagaaggtcatgtcgtctacaaacaaatgtaattttacttctttctttctgatttggatgagtttgatttcttttgctatttaattgctctggctaggacaggcagtattgattgaatagaaggggtgagagcattcttgcatcatgtgagatcgtacaggaaagcattccattttccctgcttggttatttactcatttgtcatttcatggatgttctttctattgttgaggtaaatttccttttctattttgtttaggatttctatgatgactggattttgaattttgtggaacgctttttctccatctactaaggtgatgtggttttaatctttcattctgttctagtggtatataacattgatttgcttgaatatgttgaaccatccttgcatcccagaaataactggcacttgaatatctacatttttttaatatcctcttgaatacagttttctaggacaagggatcttcaagaagttctggaaaaatacatattatgagaaaattgtgcatgaatttcacaatttttgcaccaaaataaactagtgctagtctgttataacatgtctgaacaggctctagtttgatgccctcaaaaggataagacatgagtataaaaagagactccatcaaagcaatataaattctgatgaaatttaaacaagaagaaacattaaatttatgatgagaccagatgcagtggctcaggcctgtaatcccagcattttcagaggctgagacaggtgggccacatgagcccaggtattcaagaccagcctgggaaacgtggggaaatccccttttctacaaaaaatacaaaaattagctgggcatggtggcacatgcctgccgtctcagttattgtgaagtctgtgcagggaggatggcatgaacctgggaggtcaagattgcagtgagctatgatcatgccactgcactccagcatgggtgatggagagagatactgtcttaaaaaaagaatacttgtggtaacgtttgggtagaggaataatgaaatcattgatgctttataaaaaggttatggggacaatgcccaaaagaaataaacagtttgtaaacggataacttattttgagttagggcaagacaatgttgacagtgatgcatgaagcagcaggcagaccttccacatcatttttacagaaaaaaaaattaatcttgttcatgctgcaatgaagaggactgacagcaaacagcagaaacatagtcagaatttagagaacagcctggttaacatggtgaaacaccatctctagtaaaaatacaaaaattagctcagcatggtggcatgcgcctgtaatcccagctactcaggaggctgaggcaggggaatctcttgaacccaggaggtggaggatgcagtgaactgagatggcaacattacactctagcctgagcaacaagagcaaaactccatctcaaaaaaaaaaaaattgtcaagttccttctcttccattctttgccatcgtggtgtgtgcttgactctgcttcttgccacatcttctcagaagactttcaggattaagcgattcctggccaagaaacaaaagcaaaaccatcccactcccctgtggattcagatcaaaactggtaataaaatcaggtacgactccaaaaggagacattggagaagaaccaagctgggtctataaggaattgcatgtgagatggcacacatatttatgctgtctgagcatcacaatcacgttaccatatcaagctgaaaatgtcaccactatctggacagttggacatgttttattgggaatatgttttttctctgtaaatttgttataaacgcattggttggctgtgttcagtaataaacgtgagacttttcatttcaaaacaaaa

SEQ ID NO: 146 - protein, 479 aa, Homo sapiens
MALPQGLLTFRDVAIEFSQEEWKCLDPAQRTLYRDVMLENYRNLVSLGISSKCTMKEFSSTAQGNTEVIHTGTLQRHERHHIGDFSFQEIEKDIHNFEFQWQEDERNGHEAPMTKIKKLMGSTEQYDHRHAGNKPIKYQLGSSFHSHLSELHIFQPKGKINNQVEKSINDASSVSTAQRISCRPKTHISNNYGDNFLNYSLLTQRQEVRMREKSFQCIESGKAFNYSSLLRKHQIIHLGEKQYKCDVCDKVFIRKRYLARHRRCHTGEKPYKCNECGKSFSQMSSLTYHHRLHTGEKPYKCEECDKAFRHNSALQRHRRIHTGEKPHKCNECGKTFSQKSYLACHRSIHTGKKPYECEECDKAFSFKSNLESHRITHTGEKPYKCNDCGKTFSHMSTLTCHRRLHTGEKPYKCEECDEAFRFKSSLERHRRIHNGEKLYKCNECGKTFSQELSLTCHCRLHSGEKPCKCGECDKAYSFK

SEQ ID NO: 147 - DNA, 5144 bp, Homo sapiens
gtggttattgagttaagcctggcgagtcgaggtgacccgggccgggctgcgggaggagctcgcggtgaggtggccccgcgctgccgggcgaggtcggtccacgtggagccgggagcctgaggcctctgtacgcgggagctgcggacgatggtgttctgcaagtgaaggccccctgaagtggaagacagcattggtactaatggccaactcaagtttcattggggatcatgtccatggagctcctcatgctgtcatgccagaagtggaattccctgaccaattctttacagttctaaccatggaccatgaactggtgacactcagggatgtggtcatcaacttctctcaggaggaatgggaatatctggattctgctcagaggaacttgtactgggatgtgatgatggagaactacagcaacttactctcactggatttggagtccaggaatgagactaagcatttatctgtaggaaaagatattattcaaaacactggttctcagtgggaggtaatggaaagtagcaagttatgtggccttgaaggttccattttcagaaatgactggcaaagcaaaagcaagattgacttacaaggacctgaagtgggatatttcagtcaaatgaaaatcatctctgaaaatgtgcccagttacaaaactcatgaatctcttactttacctcggagaactcatgacagtgagaagccctatgaatacaaggaatatgagaaggtcttcagttgtgacttagagtttgatgaatatcagaaaatacatactggtggaaaaaactatgaatgtaatcaatgttggaaaacctttgggatagataactccagtatgttacaactgaatattcatactggtgtgaaaccttgtaaatatatggaatatgggaatacatgtagtttttataaagactttaatgtataccagaaaattcataatgagaagttctataaatgtaaggaatacagaaggacctttgaaagagttggaaaagttactccacttcaaagagttcatgatggtgagaaacactttgaatgctcattctgtgggaaatcctttagagtgcatgcacaacttactcgacatcagaaaatccatactgatgagaaaacttacaaatgtatggaatgtggcaaggacttcagatttcattcacagcttaccgaacatcagagaattcatactggtgagaaaccctacaaatgtatgcactgtgagaaggtttttagaattagttcacagctcattgaacatcagagaattcacactggtgagaaaccttatgcatgtaaggaatgtgggaaggcttttggagtatgtagagaacttgctcgtcatcagagaattcatactggtaagaaaccctatgaatgcaaagcatgtggaaaggtctttagaaatagttcatccctgactagacatcagaggattcatactggtgaaaaaccctataaatgtaaagaatgtgagaaagcatttggagtaggtagtgaacttactcgacatgaaagaattcacagtggtcaaaaaccttatgaatgtaaggagtgtggaaagttctttagacttacgtcagcccttattcaacatcaaagaattcatagtggtgagaaaccttatgaatgtaaggtatgtgggaaggcctttagacatagttcagcccttacagaacatcagagaattcatactggagaaaaaccctatgaatgcaaggcatgtgggaaggcctttagacatagttcatcctttaccaaacatcagcgcattcatactgatgataaaccctatgaatgtaaggagtgtgggaattcctttagtgttgttgggcatcttacttgccaaccgaaaatttacactggtgagaaatcatttgactgaaataaatgtataaagtggttttttatttctgattttcacaggaaaatactgtggatggatttaataggtaatcaaggcaattcagtatctccctctcttaaagtctgtttttagacttcatggtcattctgtatgtagacgtagaattgcttagtcatagctgatatatacttatagctttgttagatgttgccaaatatttctcctttttatgttaaaaagtttttttcatgagtttctcatcctggcatgttttgtttacaatagcttttgatgtttgtattattgctcttttgactattcagttttttaattgtaatattacttcaatatcttttctgcattgtaattctttgcttgtgatatctatacttacttattttcctccacagagttagcactcctagtcagatacaatgtatttttacagtcttacagctcatcattttgtgtaatgttgttttgttttgttttaaatgatagaagtgtgatctcctttccattttcatccaattgttgacttctctttaaatttctactttattttgatacaacatattccccccaaaaaaacacatacataggaactggttatattccaccataacacacacacacacacacacacactatatacatatagtgtatatacacatatagtgtatatagtgtatgtgtgatgtatactatacatatcacatatactatatgtgtgtatatagtgtgtgatgtatatgtgtgtgatgtatactatatatgcccacacatgcactacataacacactatatatatatatatatatacacacacacacacacaatatatgtatatatagtatatacactatatactgggcactatatatatatagtgtgtatgtgtgttatattggaatataaccagttcctttaagcagtctttttacctgcaggctataccaaccaggatccaaatgaagagaactcttttaaatatttgataaaactactcacccagtaagtctcttaaaatttatcattctcttaaagtatcactctaaaatttgtcaaacacctttaaaaggggagaaaaaatgaccactgaacttacattaagagaatttacaactatatattaacatggcttcaattgtttttttaatctattatcattatttttctttttattccctctcagagttgacttactaggtttgggcatttcaacaatcagcagaccttctttggtttaactaatctcatttaactccaaaatcatctctctcttaggactgctgacttggttatgcagtcaatgagatcacgagccactggttattggattttttttctttttttttagacagagttttgctcttgttgcctaggctggagtgcagtggcgcagtcttggctcacctcaacctctgcctcccaggttcaggctattctcctgctcagcctcctgattagctgggattacaggcatgcgccaccatgaccggctaattttatatttttagtagagacgggatatctccgtgttggtcagtctggtctcaaactcccgacctcaggtgatccacccgcctcagcctcccaaagtgctgggattacaggcatgagccaccgcacccagcctggttattggatttatttatttattttgagatagagccttgctctgtcaccaggccggagtgcagtggtgtcatctcagatcactgcaacctccacctcccaggttcaagcgattcccctgcctcagcctgccaagtagctgggattacaggcatgcgccaccatgcccagctaattgtattttagtagatatggagtttcaccacgttggccaagacagtctcgatttcctgaccttgtgatccccctgcctcggcctcccaaagtgctgggattacaggcatgagccaccacgcctgtccggttatttgatttttataagaaaattttactattattttcagataaatttatgtcactgtcattcattacattttaatttttgaaactgatgtctttcccagaatttatgtactctataacggtgtgaatgattaccagtattaagccattttctcatctgatatattgagctatgttttatgtaagtattgcttattcaagtagttttaaaagatatgtaattggttgttgtttcatgtcctacacagtaagaacaagagtatgttaacctttttgtcaggatatttgctatttcatatctttgaaatagagtagtagctctatttctaactaaattctatttatgtaacaacacagctaatttactcttggatctcattctccctttttatcctgagttaccatcagtgctaatgttcctcttttgggtatagttctccaggagaacttgtcctatatttctttgtgtgtgtttttttccttccagcttaaacaaattaaaactaaatatctaaaccttgtatacagacattaaaattagtgagagaaacaaaatatccttgtgtcttggcttttactttttgaagtcattaacaaataataaattaatgaataaaatgtgtccttattatgttttccttgtttgtagttacagctatatttttatcatattaacatttttcacttaacttcgtaatgaacttatggcatttcacacttactcgaaaccataatataattattattggtggtattactgtttggtttttactatttttactcaaaaacataaaacttcaccattctttccattttcatttgcccctttattctttctgacttttctctaagcctgcataggagctttattctcatattcaataggataggatattgcagtctcatcctgttttctgctgtcctgcaccattaaattttatatgtccttgaaggaattcaatttaatggcaactaatatatgtatgttagggacaggtaaagagtctgtgactgagatttctggagttatataacccctgcgccaccccccaccccaactccaacttgccagaattcaccccttaacctgcaatgtgattgtatttggacatagggcaatgaggacataagaatgtgattctaatttgatacaaatggtgatcttatgagaagaggaaggagagacgtctcttcctatgctcacacacaaaggaaagtccacatgaggacacaaggagaagccaagagagcccttaccaggaattaaacctgctaatccctattttaattagaacagtgagaaaataaatatctgtatttaagcctcaca

SEQ ID NO: 148 - protein, 563 aa, Homo sapiens
MANSSFIGDHVHGAPHAVMPEVEFPDQFFTVLTMDHELVTLRDVVINFSQEEWEYLDSAQRNLYWDVMMENYSNLLSLDLESRNETKHLSVGKDIIQNTGSQWEVMESSKLCGLEGSIFRNDWQSKSKIDLQGPEVGYFSQMKIISENVPSYKTHESLTLPRRTHDSEKPYEYKEYEKVFSCDLEFDEYQKIHTGGKNYECNQCWKTFGIDNSSMLQLNIHTGVKPCKYMEYGNTCSFYKDFNVYQKIHNEKFYKCKEYRRTFERVGKVTPLQRVHDGEKHFECSFCGKSFRVHAQLTRHQKIHTDEKTYKCMECGKDFRFHSQLTEHQRIHTGEKPYKCMHCEKVFRISSQLIEHQRIHTGEKPYACKECGKAFGVCRELARHQRIHTGKKPYECKACGKVFRNSSSLTRHQRIHTGEKPYKCKECEKAFGVGSELTRHERIHSGQKPYECKECGKFFRLTSALIQHQRIHSGEKPYECKVCGKAFRHSSALTEHQRIHTGEKPYECKACGKAFRHSSSFTKHQRIHTDDKPYECKECGNSFSVVGHLTCQPKIYTGEKSFD

SEQ ID NO: 149 - DNA, 4845 bp, Homo sapiens
ggaacttccggcgtcctccctgtggcgggcactttggcttgtgtcagttccatccgcgggtgccggatctggacctaggtgctgacagcgagaaggcgcgaggagagtcgttttctcagctgcacagccggggcctgacggtcgccggcggtggtgacagctttgctcttgtctccgcccggatcgtccaccgctcccggcccgctccgcccagagtccgatggcggcggcactgagggccccgacccagattgccactagtacttacaggtccgtaagaagcacttgaagaccctacaaggcaggtttttgtagcctttgaggatgtggccatttacttctcccaggaggagtgggagctccttgatgagatgcagaggctcctgtaccgcgatgtgatgctggagaactttgcagttatggcatccctaggttgctggtgtggagcagtagatgaggggacgccttctgcagagagcgtttctgtggaagaactgtcacagggcaggactccaaaggcagatacatccactgataagagtcacccctgtgagatttgtaccccagtcctgagagacattttacaaatgattgagctccatgcctcaccctgtggacagaaattgtacttgggtggagcatcaagagatttctggatgagttcaaaccttcaccagctccagaagcttgataatggagagaagctctttaaagtggatggggaccaggcctcatttatgatgaactgcaggttccatgtgtcaggaaaacccttcacgtttggggaagtcgggagggacttttcagccacctcaggacttctccagcatcaggtgactcccaccattgagagaccacacagcaggattagacacttgagagttcccactggacgaaagcctctcaaatacactgaatccaggaaatcttttagagagaaatctgtattcattcaacaccaaagagctgactctggagaaaggccttacaagtgcagtgaatgtgggaaatcctttagtcaaagttctggctttcttcgacacaggaaagcacacggtagaacaaggactcatgaatgtagtgaatgtgggaaatcatttagtcgcaaaactcacctaactcaacaccaaagagttcacactggagaaaggccttatgactgcagtgaatgtggcaaatcctttcgccaggtatctgtcctcattcaacatcaacgagttcacactggagaaaggccttatgagtgcagtgaatgtgggaaatcttttagccacagcactaacctctatcgtcacaggagtgcccacactagcacaaggccttatgagtgcagtgaatgtggaaaatcctttagccatagcactaacctctttcgacactggagagttcacactggagtaaggccttatgagtgtagtgaatgtgggaaagcatttagttgcaatatctaccttattcaccaccaaagatttcacactggagaaagaccttatgtgtgcagtgaatgtgggaaatcatttggccagaaatctgtcctcattcaacaccaaagagttcacactggagaaaggccttatgagtgcagtgaatgtgggaaagtttttagccaaagctctggcctctttcgacacagaagagctcacactaaaacaaagccttatgagtgcagtgaatgtgaaaaatcatttagttgcaaaactgacctcattcgacaccagacagttcacactggagaaaggccttatgagtgcagtgtatgtgggaaatcttttatccgaaaaacccacctcattcgacaccagactgttcacactaatgaaaggccttatgagtgcgatgaatgtgggaaatcctatagccaaagctctgccctccttcagcataggagagttcacactggagaaaggccttatgagtgcagagaatgtgggaaatcttttacccgcaaaaatcacctcattcaacacaagacagttcacactggagaaaggccttatgaatgcagtgaatgtggaaaatcctttagccaaagctctggcctcttaagacacagaagagttcatgtgcagtgaatgtgggaaattattttgtcacttttttttttttttttgagatggaattttgctcgtcacccaggctggagtgcaattgtgcaatctcagctcactgcaacctccgcctcctgggatcaagtgattctcctgccacagcctcctgagtacctgagattacaggcacccaccaccatgcccagctaatttttgtatttttaatagaaacaaggtttcaccatgttggtcaggctggtgttgaactcctgacctcaggtaatccacctgcttcagcctaccaaagtgctgggattacaggcgtgagccaccatgtccggcttgtgttgtgacatttaacacaagatttcccaaagaagaaaggccttatatatgctgtgaatgtgtttttgcttgttagtttgttttaacttggtatgacggcactggaggctagcctttgagaagagccttctctgatgtgactcatgtatccaaacatccatggatttcccataaatttgaggtatgtgggaagcatgtgtagctatgttgtactctctaaacctgcccagggaccttaccagattcgtgtcactgccagtttctgcggctgaagccttttcatcactacccgctgggagacccacagagtgtgcatcagtcaccaccccaacatgctcagggaggcagagttcttccattagttggaggaaagcacgagtagtctaagctcttaggggggtttctcatttcctcctgtggctacatagtgcatataactaccccagtgttggccccaggacctgatctgagttctgctggcagcttccagaggattgccttttttgaggacattgttgatctcaggcgatgcttgtgatgaagcattttttagcttccaccacttaccaggaactgcctgttaactggcttgtgcaatgataaaggccttttgtttaagtacctttaatcttgtaagttgtattaattgttgagtagtttggaaacataataggactctgtcagcttaaaagggtatataacatttgtggggattcaaattttgtttgcctcagaggggacagtatgctcacagaatatagattttgctccatttttggcctatttcgcattgtttccaaggccttctaggagacactgcagggctttctggctctgatttttgcctgcatgtgggctcagaggtcattctgcagagggggcagttgtggcaacttccattgtttctggagacaacacaaagtttttcttgttgagtgaggatatcacataatgccctgcaatgtttagaatcccttaatgaggtcctgtgaaggagctgtgtcccttgaaacacagaattcagtgagctagtgtccctagctataaaaccatggggctggagcgaaacataattggtaaagaaacgctgggttgaataatagggaatggaggagactgcagcaaattagatggactgttcctcatataaagtttcatccggccgggcgcagtggctcacacctttaatcctagcactttgggaggctgaggtgggtggatcacaaggtcgggagttcaataacagcctggccaaggtggtgaaaccctggaaggctgaggcagataattgcttgaacttgggaggcagaggttgcagtgagctcagatcacaccactgcactccagcctgggtgacagagcgagactgcgtctcaaaaaaaaaaaaaaaaagatccattcaggccagtcacagtggctcatgcgtgtaatccctacactttccgaggccatggcgtgcagatcacttgaggtcaggagtcagagaccagactggccaacatggtgaaaccccatctctactgaaaatacaaaaattaaccaggtgcagtggtgcacgtctataatcccagctgctctgaaggctgacgcaccaagaatagcttgaacccggaagtggaggttgcagtgagctgagaccacaccactgcactccagcccgggtgatggagtgagactctgtttccaaaaaaaaaaaggctgggcgtggtggctcacgcctgtaatcccagcactttaggaggccgaggtgggtggataacccaaggtcaggagttcgagaccagcctggtcaacatggcgaaaccctgtctctactaaaagtacaaaaattgtaaaagtaaaaagtaaaagtaaaagctgggtgtggtggcaggcaccagtaatcctagctactcaggagacaggcagaagaatctcttgaacctgggaggtgagccgagatcgcaccattgcacttcggcctgggcaacaacagcgaaactctgtctcaaaaaaaaagtatccacaaatgttccagtgactatgactgcaagatcactgtgtgcagaaatctctagaaatgtgtgtcttgtagctcaagttattactagagacaacaagggttttgtggattcctgtagcctctctggcctgtttacttcaaggccattgctgcacagacaaaaaaaaaaaaggatgaagtcaagagagattcggttgtccttggtgcggcttttgtgatccagtagcaatcctcttaacgctgatggaaatggccttcattgctcacctgtatttcctgccactgaagcaggtctgcctctacgtggcctggggagctagatggtagagtcaatagagacttagtaaaccagactttttgaagtgtcaatgaccaagattgttattgcatccattaaaaaaaaatcaagttataattgatgtggaataaattatatatatttaaagtgta

SEQ ID NO: 150 - protein, 566 aa, Homo sapiens
MQRLLYRDVMLENFAVMASLGCWCGAVDEGTPSAESVSVEELSQGRTPKADTSTDKSHPCEICTPVLRDILQMIELHASPCGQKLYLGGASRDFWMSSNLHQLQKLDNGEKLFKVDGDQASFMMNCRFHVSGKPFTFGEVGRDFSATSGLLQHQVTPTIERPHSRIRHLRVPTGRKPLKYTESRKSFREKSVFIQHQRADSGERPYKCSECGKSFSQSSGFLRHRKAHGRTRTHECSECGKSFSRKTHLTQHQRVHTGERPYDCSECGKSFRQVSVLIQHQRVHTGERPYECSECGKSFSHSTNLYRHRSAHTSTRPYECSECGKSFSHSTNLFRHWRVHTGVRPYECSECGKAFSCNIYLIHHQRFHTGERPYVCSECGKSFGQKSVLIQHQRVHTGERPYECSECGKVFSQSSGLFRHRRAHTKTKPYECSECEKSFSCKTDLIRHQTVHTGERPYECSVCGKSFIRKTHLIRHQTVHTNERPYECDECGKSYSQSSALLQHRRVHTGERPYECRECGKSFTRKNHLIQHKTVHTGERPYECSECGKSFSQSSGLLRHRRVHVQ

SEQ ID NO: 151 - DNA, 3690 bp, Homo sapiens
gtcgcgtgacgtcatctccgtgagcaggattggccctggaacagtgtggggcctggaccgctgggtaggcgcgtccagcggcctgagcaggggagggtaatgaggctgttacgcgccttctccgcatcttggcgggagcctgacgccccgcttcttccctaacggggtgttccaccggcgcctgccgaggcctaggcctccgcagccgccctccgtctcctcagccccgacgctgcgcccgctttgtgcgcatttttctctggggaaactgaggctccgagtgcgaaagtcagccgaggtcgccccgcccaggacagagaagggctgggggtcggctgagccgcggcattcccgggccccgctagggctgcagggtctcaggatggcagcctcggcgcaggtgtctgtgacctttgaggatgtggctgtgacattcacccaggaggagtggggacagttggatgcagcccagagaaccttgtatcaggaggtgatgctggagacctgcggacttctcatgtctctgggctgtcctttgttcaaaccagagctgatctaccagttggatcacagacaggagctatggatggctacaaaagacctctcccaaagctcctatccaggtgacaacacaaaacccaagaccacagagcctaccttttctcacctggccttgcctgaggaagtcttactccaggaacaactgacacaaggagcctcaaagaactcccaattagggcaatccaaggatcaggatgggccatctgaaatgcaagaagtccacttgaaaatagggataggcccccagcgggggaagctgctggagaaaatgagttctgaacgtgatggtttggggtcagatgatggtgtatgtacaaagattacacagaaacaagtttcaacagaaggtgatctctatgaatgtgattcacatggaccagttacagatgccttgattcgcgaagagaaaaattcctataaatgtgaggaatgcgggaaagtgtttaaaaagaatgccctccttgttcagcatgaacggattcacactcaagtgaagccctatgaatgcacagagtgtgggaaaacctttagcaagagcactcatcttcttcagcacctcatcatccacactggggagaagccctataagtgcatggagtgtgggaaggcttttaaccgcaggtcacacctcacacggcaccagcggattcacagtggagagaagccttataagtgcagtgaatgtggaaaggccttcacccaccgctccacttttgtcttgcatcacaggagccacactggagaaaaaccctttgtgtgcaaagagtgtggcaaagcctttcgagataggccaggtttcattcgacactacatcatccacacgggagagaagccctatgagtgcattgagtgtgggaaggccttcaaccgccggtcatacctcacgtggcaccaacagattcacactggagtgaaaccctttgaatgcaacgagtgtggaaaagctttttgcgagagtgcagacctcattcaacactacattatccacactggggagaagccctataagtgcatggagtgtgggaaggcgttcaaccgtaggtcacacctcaagcagcatcaacggattcacactggggagaagccttatgaatgcagtgaatgtggaaaggccttcacccactgctccacttttgtcttgcataaaaggacccacacaggagaaaaaccctatgaatgcaaagaatgtggaaaagcctttagtgatagggcagacctcattcgccacttcagcatccacactggagagaaaccctatgagtgcgtggagtgtggaaaggccttcaaccgcagctcacacctcacgaggcaccaacagattcacactggagagaaaccctatgaatgcatccagtgtgggaaagccttttgccggagcgcaaaccttattcgacactccatcattcacactggagagaagccgtatgaatgcagtgagtgtggaaaggcttttaatcgcggctcatccctcacacatcatcaaaggattcatactgggagaaaccctaccattgtaacagatgtgggaagaccttttatgactgcacagacttcagtcaacatccaggaacttttattagggaaagagtttttgaatatcaccactgaagaaaatctgtggtgaaagggaacatcttaccatctggccattcacactgaagagaaacttcataagcatcctctctttgagaaaacgtgtaatagatgatcatttgtcgtctaaacaatcaagttagaaattgaaccagcctggagtcttattctccacctgagaattcacccatgagagagacccagtggttgctatgcacttaggaaaactttcagccacatctttcttcttagtttacagtgaaatattatctcagggatattttttttttttttttgagacggagtctcgctctgtcgcccaggctggagtgcagtggcgggatctcggctcactgcaagctccgcctcccgggttcacgccattctcctgcctcagcctcccaagtagctgggactacaggcacccgccactacgcctggctaattttttgtatttttagtagagacggggtttcaccgttttagccgggatggtctcgatctcctgacctcgtgatccgcccgcctcagcctcccaaagtgctgggattacaggcgtgagccaccgcgcccggccatctcagggatatttaaacaaaggaagaggaaatatagggaagagaaagaaaccacagcttcttttagacttgtctgacaagcctatggcaattttgtcgtccctttgttattttatgtgggagagggaaatgtttcagaaacgaaagatctcatcccctttatttttctgtgtatgcattcactgctgcccagtgtcagaacagttatacaaacgagggcttgaaaacattttgtgaaaacttgcttagtcctgcaacgttctccactctcgaggtgcagaagcatacatctttataaaaaatatggaggcttgagttatgaaacacttttataaggagataaggatgtacatatgtttggacacattgtccacttcagatgcttgtttaaaaaaatgtttcaccatgtgtctttacccaatacacatactttttcttgatgtggatttactttttttttttttttttaagttttcctgggatagggatgatagtgtaattgttcatgcccacagtaatcctgggaatcttagttttttcctatgattgtggtttctcagcttctttacctctcctttgagttaggtccacctcagttttctaaaggtcaaattaaggcccccccaaaaatacagtatgtagctgaattcctttgaaagatcatgataaactcagaagaacaaacatagaaggaatgtcatttttaatctttttaaagagtgtgtgaaaattcactttaactggaattttaacaggcaagccggcatgcatatatgtagggatgtgtgactttcacagttgtcaccatggacttaggcttgattaaaatgctacacatttagagcgttttgtaattccttttttatatttttaagactagattttgagccatgtgatagttttacctcatattaaatatattgtacagaagtaaaaataatcatgtattcactttgaa

SEQ ID NO: 152 - protein, 600 aa, Homo sapiens
MAASAQVSVTFEDVAVTFTQEEWGQLDAAQRTLYQEVMLETCGLLMSLGCPLFKPELIYQLDHRQELWMATKDLSQSSYPGDNTKPKTTEPTFSHLALPEEVLLQEQLTQGASKNSQLGQSKDQDGPSEMQEVHLKIGIGPQRGKLLEKMSSERDGLGSDDGVCTKITQKQVSTEGDLYECDSHGPVTDALIREEKNSYKCEECGKVFKKNALLVQHERIHTQVKPYECTECGKTFSKSTHLLQHLIIHTGEKPYKCMECGKAFNRRSHLTRHQRIHSGEKPYKCSECGKAFTHRSTFVLHHRSHTGEKPFVCKECGKAFRDRPGFIRHYIIHTGEKPYECIECGKAFNRRSYLTWHQQIHTGVKPFECNECGKAFCESADLIQHYIIHTGEKPYKCMECGKAFNRRSHLKQHQRIHTGEKPYECSECGKAFTHCSTFVLHKRTHTGEKPYECKECGKAFSDRADLIRHFSIHTGEKPYECVECGKAFNRSSHLTRHQQIHTGEKPYECIQCGKAFCRSANLIRHSIIHTGEKPYECSECGKAFNRGSSLTHHQRIHTGRNPTIVTDVGRPFMTAQTSVNIQELLLGKEFLNITTEENLW

SEQ ID NO: 153 - DNA, 3302 bp, Homo sapiens
accggaagcaccgccattggccggtgcgtgcaggtggcagccaagagcctcctggcacagcggcaccaggcaggtgacgcctattggaccccagaggtcatcccagctccagacgtggacacattttcttccaatgatgtctacggatgaggaaactgaggcctggagaggttaaagagacccgttcagagtcctacagtggcagactggtcttctgaggacctctgccctctacacagcggcctcttcaggtgcagggaggaaatggaagcacgttctatgctggttccaccccaggcatctgtgtgcttcgaggatgtggctatggcattcacacaggaggagtgggaacagctggacctggcccagaggacactgtaccgagaggtgacactggagacctgggagcatattgtctccctggggcttttcctttccaaatctgatgtgatctctcagctggagcaagaagaggacctgtgcagggcagagcaggaggccccccgagactggaaagctacccttgaggagaataggttgaattctgaaaaagatcgagctagggaagaactatcccaccacgtggaagtgtacaggagtggaccggaggagccaccctctttggtattaggaaaagtgcaagatcagagcaaccagttaagggaacaccaggagaactccttgaggttcatggtactcacctcagagagactgtttgctcaaagggaacattgtgagcttgaacttgggggaggttattctctaccttctactttaagccttctacctacaacattacctacaagtacaggtttccctaagcccaactcacaagttaaagagttgaaacaaaattcagctttcattaatcatgagaaaaatggagcagatgggaagcactgtgagagtcatcagtgtgctagagctttctgtcagagtatttacttgagtaaacttggaaacgttgaaacaggaaagaaaaacccttatgaatatattgtcagtggtgactctctcaactatggttcctccctttgttttcatggtagaactttttcagtgaagaaaagtgatgactgtaaggattatggaaacctcttcagtcacagtgtgtctctgaatgaacagaagccagtgcattttgggaaaagtcagtatgagtgtgatgagtgcagggaaacctgttctgagagtctgtgccttgtacaaacagaaagaagtggccctggagagacccccttcagatgtgaggaacgctgtgctgccttccccatggcctcatctttttctgactgtaacatcattcagactacagagaagccatctgtgtgtaatcagtgtggaaaatctttcagctgttgtaagctcatacaccagagaacacacactggagaaaagcccttcgaatgtactcagtgtgggaaatcttttagccagagctatgaccttgtcatacatcagaggacacacactggagagaagccctatgagtgtgacctgtgtgggaaatccttcacccagagatccaaacttattacacatcagcgaattcacactggagaaaaaccgtatcagtgtattgaatgcagaaaatccttcaggtggaactctaacctcattgtacatcagagaattcatactggagagaaaccgtatgagtgcactcactgtggaaagtccttcagccaaagctatgagttagttacacataaaagaacgcacactggagaaaaacccttcaaatgtactcagtgtgggaaatctttcagccagaagtatgaccttgttgtacatcagaggacacacactggagagaagccctatgagtgcaacctgtgtgggaaatccttctcccagagttccaaacttattacgcatcagcgaattcacactggagaaaaaccgtatcagtgtattgaatgtgggaaatccttcagatggaactctaacctcgtcatacatcagagaattcatactggagagaaaccgtacgattgcactcactgtggaaagtccttcagccaaagctatcagttagttgcacataaaagaactcacactggagaaaagccctatgaatgtaacgagtgtggaaaagccttcaatcgaagcactcagctcatcaggcatctgcaaattcacactggggagaagccgtacaaatgcaatcagtgcaataaagcctttgcaaggagctcctaccttgtgatgcatcagagaactcacactggtgagaaaccttttgagtgtagtcagtgtgggaaagccttttcagggagctctaaccttctttcccatcacagaattcattctggagagaaaccctatgaatgtagtgactgtgggaaatccttccggcagcaatctcaacttgtagtgcatcggcggacacatactggagagaaaccttaggagtgcagtcattgtgggaaagctttcatccagaggtctcccctcatcatgcaccagaggacgcatgtcggtgggaagagctatcagtgtgacgtgtattaagccagcggttgtgactcattgaacatcagaggacatatcctggagaaaagccctacgaatgcattgattgtgggaaagccttcaatgatcgctcaacccttagtaaacacgagaggacacacactggaggcaaaccctatgaatgtgaccattgcgagaaagcctttagccaacggtgtcaacttactaggcagcagagaattcatactggagagaagccctgtgaatgttaacaaatgtggaaaagcttccagttatgatactttccttattcaacatgagaaagctcatgggcaagaaactctatgaataaccaagatggagccgggtgcagttgccaacacttgtaatcccagcagtttgcgaggccgaggcaggtggatcacttgagcccaggagtttgaaaccagcctgggtaacatggcaaaatcctgtctttacaaaaaatacaaaaattagcctagcatggtggcgcatacctgtagtcctagctactcaggaggctgaggtgggaggatcacttgagcttgggaggcggtggttgcagtgagctgtgatcatgccatcacaccgctgccttgtgagagattgagacactctaaataaataataaccaagatgggaaatttccctgccagaccttgtttactagaaatcaggtggccaaaacatgactctcagagtggggcttcatgaccatgtgcatcagaattgcctggagtgtgcactgaaactgtgtattaccaagctcactctagccaactaaataaaaatctctggcagtaaaa

SEQ ID NO: 154 - protein, 715 aa, Homo sapiens
MEARSMLVPPQASVCFEDVAMAFTQEEWEQLDLAQRTLYREVTLETWEHIVSLGLFLSKSDVISQLEQEEDLCRAEQEAPRDWKATLEENRLNSEKDRAREELSHHVEVYRSGPEEPPSLVLGKVQDQSNQLREHQENSLRFMVLTSERLFAQREHCELELGGGYSLPSTLSLLPTTLPTSTGFPKPNSQVKELKQNSAFINHEKNGADGKHCESHQCARAFCQSIYLSKLGNVETGKKNPYEYIVSGDSLNYGSSLCFHGRTFSVKKSDDCKDYGNLFSHSVSLNEQKPVHFGKSQYECDECRETCSESLCLVQTERSGPGETPFRCEERCAAFPMASSFSDCNIIQTTEKPSVCNQCGKSFSCCKLIHQRTHTGEKPFECTQCGKSFSQSYDLVIHQRTHTGEKPYECDLCGKSFTQRSKLITHQRIHTGEKPYQCIECRKSFRWNSNLIVHQRIHTGEKPYECTHCGKSFSQSYELVTHKRTHTGEKPFKCTQCGKSFSQKYDLVVHQRTHTGEKPYECNLCGKSFSQSSKLITHQRIHTGEKPYQCIECGKSFRWNSNLVIHQRIHTGEKPYDCTHCGKSFSQSYQLVAHKRTHTGEKPYECNECGKAFNRSTQLIRHLQIHTGEKPYKCNQCNKAFARSSYLVMHQRTHTGEKPFECSQCGKAFSGSSNLLSHHRIHSGEKPYECSDCGKSFRQQSQLVVHRRTHTGEKP

SEQ ID NO: 155 - DNA, 2754 bp, Homo sapiens
gtacgcagaggcggtagtgacacaggcacaactgacagtggcagaagctcagctgacaaggactggggacggcggtgtccttgtcttgcctttgtcgcccccgcccctctcttccctggctggacttgcggagtccccgccgaagaacccgagggtcccctggcgatggcagaaatgaaccctgcacagggtcatgtggtttttgaagacgtggccatatatttctcccaggaggagtgggggcatctcgatgaggctcagagattgctgtaccgtgatgtgatgctggagaatttggcccttttgtcctcactaggttgttgccatggagctgaggatgaggaggcacctttagagccaggtgtttctgtaggagtgtcacaggtcatggctccaaagccctgtctatctacccagaatacccagccctgtgagacatgtagctcacttctgaaggacattctgcgtctggctgagcatgacggaacacaccccgagcagggactgtacacgtgtccagcacatcttcaccagcaccaaaaggagcagattagagagaaactttctagaggggatggaggaagaccgacatttgtgaagaaccacagagttcacatggcagggaagaccttcttgtgcagtgaatgtgggaaagcctttagccacaaacataaactttctgaccatcagaaaatccacactggagaaagaacttataagtgcagcaaatgtgggatattgtttatggaaaggtccacactcaatagacatcagagaactcacactggagaaaggccttatgagtgcaatgaatgtgggaaagcctttctttgtaagtctcaccttgttcgtcaccagacaatccactctggagaaaggccttatgagtgcagtgaatgtgggaaattgtttatgtggagttccacactcattacacatcagagggttcacactggaaagaggccttatggttgcagtgaatgtgggaagttctttaagtgcaactcaaacctctttaggcattacagaattcatacaggaaaaaggtcttatggttgcagtgaatgtgggaaattctttatggaaaggtctacactcagtagacatcagagagttcacactggagaaaggccttatgagtgcaatgaatgtgggaaattcttcagcttgaaatccgtcctcattcaacaccaaagagttcacactggagaacggccttatgaatgcagtgagtgtgggaaggccttccttacaaagtcccacctcatttgtcatcagacagttcacactgcagcaaagcagtgcagtgaatgtgggaaattctttaggtataactctacacttctcagacatcagaaagtccacactggataaggcccttatgaatgcagtggatatgggaaagccttcagtcaccaacatattgtggctggacagcaggcagtacacactggagaaagactgaatgccgtgaacgtgggtaattatgtaggtacagctctccagtcgctatgtatcagagaattcacactgcagaaatgtgtgttcagcaaactcgggacattattttggtttgactctcatctcattagacattggagagtttacactgaagaagagtcttttcaataaagtagaaagtggtaaagattcaacatgcaagattgtacttattgggcttcagaatatccacactagtgaaagtcttctgagtacagcaaatgtgtgacattattttgctactactccacactacttagacatcatgtagttcacactggaaaaaggccacgtatgtgccttgaatgtagccaaaatgacgaacaacacccagaaatctgtgatttagcactgagaactagtattatatggtttttaaaaaacaatggtgaagtacatgccacataaaatttgccatcttaactattgtaatgtcttgtttaatacttgaagtacattaacattgttgagcaaagaatatcctgaactctttatcttgtaaaatgaaactctataaccaccattaaaaaaacaactcattcccacattcttcagtccctggcgaccaccatatttttaagtcattatgactctgactattcttggtacttctcagaagaagaatcttagagtgtttttcattattttttttcacttaggataatatcctcaaagttcattcattttttagcatgtgtcagaaattttaaggctgagcaatatttcattgtttgcatttaccacatttcctttatttctgacatctattcatggacacttgggttacttctacctctggctattgtgaatattgctactacaagcataagggcacaaatatctctttgagaccctgctttcaattcttattgggtaccccaaaaagtggaactgctggatcacatggtacttctaactttaattctttgatgaactgagaaacttttccataaaacttgcaccgttttacattcctaacattccacaaaagttgtgatttgtcctcattctaatccatagaaggcaacatttctaacaggtttctaggtgattttgttgttgctgatgtagggactacattttgagaactgtcctatcccatttttataacaatgcagagcttctctgtaaataccccttgtttctatgttctatcctgtgagccttttcattttgttaatttttcccagtgtttacaaccaggaaatagcttgtcatctttgatacaaaacagaaatctttgcaaaataccaa

SEQ ID NO: 156 - protein, 402 aa, Homo sapiens
MAEMNPAQGHVVFEDVAIYFSQEEWGHLDEAQRLLYRDVMLENLALLSSLGCCHGAEDEEAPLEPGVSVGVSQVMAPKPCLSTQNTQPCETCSSLLKDILRLAEHDGTHPEQGLYTCPAHLHQHQKEQIREKLSRGDGGRPTFVKNHRVHMAGKTFLCSECGKAFSHKHKLSDHQKIHTGERTYKCSKCGILFMERSTLNRHQRTHTGERPYECNECGKAFLCKSHLVRHQTIHSGERPYECSECGKLFMWSSTLITHQRVHTGKRPYGCSECGKFFKCNSNLFRHYRIHTGKRSYGCSECGKFFMERSTLSRHQRVHTGERPYECNECGKFFSLKSVLIQHQRVHTGERPYECSECGKAFLTKSHLICHQTVHTAAKQCSECGKFFRYNSTLLRHQKVHTG

SEQ ID NO: 157 - DNA, 6587 bp, Homo sapiens
gggacttccggcctcgctggcgtggacgtttgtggtggggcgtgttggtccgcgctctcagaactgtgctgggaaggatggtagggcgactggggctcacctccgcaccgttgtaggacccggggtagggttttgagcccgtgggagctgccccacgcggcctcgtcctgccaacggtcggatggcggagacgaaggacgcagcgcagatgttggtgaccttcaaggatgtggctgtgacctttacccgggaggagtggagacagctggacctggcccagaggaccctgtaccgagaggtgatgctggagacctgtgggcttctggtttcactagggcatcgggttcccaaaccagagttggtccacctgctagagcatgggcaggagctgtggatagtgaagagaggcctctcacatgctacctgtgcaggtgacagagcacaagttcataccagagagccaaccacttacccgccagtcttatctgagcgggcctttctccggggaagcctgactctggaatcttcaacctcaagtgattcgaggttggggagagctagggatgaggaagggcttttggaaatgcagaaaggtaaagtgacaccggagacagacctccacaaggagacccatcttgggaaagtgagccttgaaggtgaaggtttggggacagatgatggtctgcactccagggcattacaagagtggttatcagcagatgttctccatgaatgtgactcacagcaaccagggaaagacgccttgattcatgcagggacaaacccctacaaatgcaagcagtgtgggaaaggttttaacaggaagtggtatctcgttcgacatcagagggttcacactggaatgaaaccctatgaatgcaatgcatgtgggaaagcctttagccagagctcaactctcattcggcactacctcatccacaccggggagaaaccatacaagtgccttgagtgtgggaaggccttcaaacgcaggtcgtacctcatgcagcaccatccaatccacactggagagaaaccctatgagtgtagtcaatgtcgaaaggccttcacccaccggtctacttttattcgccataataggacccacactggagaaaagccctttgagtgcaaagaatgtgagaaagcctttagcaatagagcccacctaattcaacattacatcatccacactggagagaagccctatgattgcatggcatgtggaaaggccttcagatgcagctcagaactcatacagcaccagcggattcacactggggagaagccctatgaatgcacccagtgtgggaaagcctttcaccggagcacgtacctcattcagcactctgtcatccacactggggagatgccctacaagtgtatcgagtgtgggaaggccttcaaacgcaggtcacaccttctgcagcaccaaagggtccatacatgagagaaccctattgctgcaatgaatacagcaaggcctttacccactgttattttatcattcataatgggacccacactgtaggaagaagtccttcgaatgcaaagaatgtcaggaaacttttcattttttttgtcagctctttcttaactaacacatgagcagtcactttggagagaagccctgtgaatacagtgaatgtaaggatcccttcagtcaccactcagttctcactcattgcagaaggattcataccagggggaaatgtggaaggcattccatcaacatcagagaactcatgctggagaaagacattccaaatataactattaaggacagtctttggccagagcagaaatcttactatctgagaatcataatgaaaagttactacataattgttattgatgtgagaaaactttgtgaccaggttgtcacttgcttgtcctataaagagccatgctggaatttgacccaccttgggattttctctatgaacttatgaaaaccttcagttacaggtatcttcttgctttatgtccttacagacttccctgtaagatcagttttattttttggtaggggaatgtttgagaggtaaaggggttttattccttttttttttttttaacatacattcactgccatcctttgtcagagttagacagtgagggcagctcttcaggcatttcttggaagttgcctttgatccagacatctctgggaggatatccatgaggagagtaattctttgtgagaaatatgaaggcttgtgtcatgagattcttgaatttagtagaaattagaatactgagaacatcttcatgtgacacttcttttttatatctagggtgagaagaacccatgtacagatggccacattaaaatgtgcaccacattaaaatgtgcaatacctaagactgtttaaggctttgatttttattaataaactcattattttttaagagacagggacttgctctgtcacccaggctagagtgcagtggcatgatcatagttccctgtaacctcgaactcctgggctcaaatggtcctcttgcctcaagtttctgagtagcttgggatacaggcatacaccactacgcctggctaatgtttgtaattttagtagagacaaggttttaccatgttggctgggctggtctggaactcctggcttcaagtggtccacctgccttggcctcccaaagttctgggattacaggtgtgagtcactgcacccagccttaaatttttttgtatagatgaggtcttgctgtgttccccagatttgtctcaaactgctagactcaagtcatcatcctgcttagcctcctaaagtgttgggattacaggtgtgagccaccacacctagcctaatatggtttcaaatgctcagcactctcacattttcctgattccattctgtctgtttgttgtctttattttctctggcaacatagtgatcactttgtacttgcttggccttctcagatgagtcctaattctttctggtgtttatcagattctttaatcctgtgtagaggggtatttttaggtccccctcagcatttttctagggattgaattatagctaaaacaggcaaaataaaacacacaactaagatgaatccatggtaaacccagtaaacccaagaaaacaacatggagaggaatctcattgtctgatcttataaacatttgcgtgaagttttgctacaaaataaagtgcctagcattttaacaggtgaatcaggatatacgtgggcaggtttacgtgagtttcatagttaaccaccatgaccttagtcccttggtgctagcactgaatatggtaattagttttgttgtgttttgagatggagtctcactccgctgcctaggctggagtgcaggagtgcgatcttggctcattgcaacctctgcctcccgggttcaagcgattctcctgcctcagcctcccaagaagctgggattacaggcatgtactaccatgcccagctaatttttgtatttttagtagagacagggttttgccatgttgcccaggctggtctcgaactcctgacctcaggtgatccacccacctcagcctgccaaaaagctgggattacaggtgtgagccactgtacttagcctgaatctggtaatttgaaattccttttgtgagattttcttttagttttcaagctacatgagataatgttaggttaaaacgtgtgaaaaatagaaaattatcattttctcactttgagctttcctcacaaccttttaaagcactgcatatatattcatgttttcatagtgggcatgtaccttttactgtggtccttttgcacatattataaatagaattcttggtgagttaagagttctctgtttttgttttttcaggacagagtgcacagtttcctctcctgtgggaaggagagttgactcttgaggacccccaccctcctgcatcctctctctggaaggctgcatgtattgtagctgtggctgtacttgtacctaaggccctgggttcaagagagttggagaaacccctctagaaacatattggctgtcatcaaagggttctttccaggcctgaggacctaggccccagtttgtcccaaagcaggagtgttttccatgggataaaggacaccctaggtttttcttagcttccagctctttccatacagtcttcactgaagtgtttggtacaaggatctactatgaacttgctgctgtgataggcaagaatctcatgagacacctgtcatttagctccatggccactcactgttgtggtcatacttagaagagtgggatgcagtggatggctgggctatgggtcctgcccttgagcagggaaggaacttactgtctaatataggaaaaacacatgagaacaggtgcaatatattgacttaaacttgtttagcacccgtttttaagtcagtagaagttttgaacttacagtaaaagttgtgaacttctgtatgttttccacagtttatgattgaggtaaaacatgttttttgttttgtttttgagacagagtttcactcttgttgcccaggctggagtgcagtggcgccatctcagctcactgcaacttctgcctcccgagttcaagggattctcctgcctcagcctcccgagtagctgggattacaggcgcccaccaccatgcccggctagtttttttgtatttttagtagagacggggtttcaccatgttggccaggctggtcttgaactcttgacctcatgtagtccacccgcctctgcctcccaaagtgctgcgattacaggcgtgagccaccgtgcccggcagaggtaaaacgttttcatgttcatgtttttgtaactttgttacatttaatgaacaaattagataaaaagcactatgctcttatgctgcttaatctgtgagaaatgattgtgggggtgggactagttatgaccattcacagttggtgcacttcaatcagtaaatgtcacagaggaaatgtggacggtaaattaactcggcaagtcggtcatgcaaagacgaattagaaatcttaatatttgtaagcagacaaaaaatgtgtctggaaggatcctcacccagttaaatggtatttgctccttgggtgtagagggagggaagggatggggtagaggggaatgtcagagttcactttaacttcatgcacatgtggaaatgtttgaaatgttcacagtaaattttataatttcagaaaaactgcttaaggttgaaaagagaaatttaagaaattgctgacggaataaaaacataatagaactacaacaccgaaggaaatgaaagaagcaagaaggaaagcaccagaagtgatttggaagagaaatcctaaaatgaatgtgaacaacagagtgatcagaagagtgtagggaattaatagtttctttaaacaagccatctcacaatggaagcctgtgtgtcttgaaattgctgtggttattattcactctgccctttgaagaactgcagaaattcatagggcaatgttaagtgtttgtgtctccaaaaaagatgttggagtcgttaccctcagaacctcaggtaatcatgttagttaatccattaggttagttcctaattgactatgactgtgtccttagaaaaatgggaaatttggtcacagaggcagatgtacagagggaagacgatgtgaagacacaggaagaacatcttcaagccaaggaacacacggggctaccagaagccgagatagaagcatggaacatatgttctagtaagaagtgtctgggttgttttggttttttttctttggagtttttgtggtattaaattatttttaaattatgttttattgtagacctcacaattctttttttttctttttcactcaaactacagcaaaatattatatttctatcctatatttcatgggcttacctctagccaattgtttttaactgccatgtaatattttacatcatgaagctttcatccttgattcaaatcctctgattatggacatgtatttcctccattttcctgctatgaaatatatcaccaccagcttgattcaaccttaaaaataaggtcatcagtattatgttctaaataaacttatggccatacatgagaaatgtaccttgcagctgaatggctaggtcatatggtgatctagtatgtaactggaattatgttatacattgcccttcctctcccataagatggacaaaagtgtttctgtatcactgtgtcccagacaatatttagaattacccagctttccagtttttactttagaagtttaaagtgatatagaatatatctggtatttctcatattgaaatacatttgaacattagttcatatcctttcattgccttttgtttttcctcttctgtcaatggtctactcatatgttggcctgtctttatttgtatcttgactttttattgtgtattttgtttatggtggggtactttattggtgattaatacgattttcaagtatattatatgggctagtcccttgatactattgacactgtatttatcttcagtctcttgttggtatctaactttggttctgaagtttatggaatggaagtatttaattggaaagattaaacatattgattttaattaa

SEQ ID NO: 158 - protein, 422 aa, Homo sapiens
MAETKDAAQMLVTFKDVAVTFTREEWRQLDLAQRTLYREVMLETCGLLVSLGHRVPKPELVHLLEHGQELWIVKRGLSHATCAGDRAQVHTREPTTYPPVLSERAFLRGSLTLESSTSSDSRLGRARDEEGLLEMQKGKVTPETDLHKETHLGKVSLEGEGLGTDDGLHSRALQEWLSADVLHECDSQQPGKDALIHAGTNPYKCKQCGKGFNRKWYLVRHQRVHTGMKPYECNACGKAFSQSSTLIRHYLIHTGEKPYKCLECGKAFKRRSYLMQHHPIHTGEKPYECSQCRKAFTHRSTFIRHNRTHTGEKPFECKECEKAFSNRAHLIQHYIIHTGEKPYDCMACGKAFRCSSELIQHQRIHTGEKPYECTQCGKAFHRSTYLIQHSVIHTGEMPYKCIECGKAFKRRSHLLQHQRVHT

SEQ ID NO: 159 - DNA, 7008 bp, Homo sapiens
ggtaccgtgggaggggccgcgcgtggggcagcggggagcgagtccctccgtccccgcgagtcggcgcttttggccccgcgggaggggccgggctcgatgagaaaagcatcattcaagctcagattcgtgttgaagcctgccacaaggtccacctgttgttgtgggtttttgggtgaccaggggttacccccagcagtgtgtgagaatgaagagtgtgggccactgtgtctctgttgacctgccagataggaaatagcgccagagttgctgcaatccacgtctccctggaattcaggagcagcttggctggaaggctctggctggaaacttgcagaaggctgtcagctgggtctgcatcatctgaaggctcaacgggtaccgggggccactccatggcctgcgagtcagagctggccgtcggtgggaggcctcagttcctctccacataggcctctccacagggccacttgagcgtcttcccaccatggcaactggtgtcctctagagcaacatccaggagaccaaggcggaagcagctgtagtgccttccaagacctggtcctgaaagtcacccctgcacccacccccgctgtctcctcagccatattctgctggtcacacagagcgctgcgggataaaggaggagcgtcctgcttcccggctgccctgttgctgtcggagtcacaggatggcggctgtcatcctgccctcgactgctgctccgtcttccctgttcccagcctctcagcaaaaaggacacacacagggcggagagctggttaatgagctcctgacaagctggctacggggcttggtaaccttcgaggatgtggccgtggagttcacccaggaggagtgggcgttgctggaccctgcccaaaggacactgtacagggatgtgatgctggagaactgcaggaacctggcctcactagggtgtcgtgttaataaacccagtctgatatcccagttggaacaagacaagaaggtggtgacagaggaaagaggaattctaccaagcacctgtccagatttggagactctacttaaagccaaatggttaactcctaagaagaatgttttcagaaaagaacagtctaaaggtgtaaaaacggaaagaagtcatcgtggagtgaaactcaatgaatgtaatcagtgttttaaagtcttcagcacgaaatctaacctaactcagcacaagagaattcatactggagaaaaaccctatgactgtagtcaatgtgggaagtccttcagtagcagatcttaccttactattcataagagaatccataatggggagaaaccctatgaatgcaatcactgtgggaaagcatttagtgatccctcatcccttagactgcatttgagaattcacactggagaaaaaccctatgaatgtaaccagtgttttcacgttttccgcaccagttgtaacctcaaaagccacaagaggattcacacgggggagaatcaccatgaatgtaatcagtgtggaaaagctttcagcacaaggtcctctctcactgggcacaatagcattcatacaggggagaaaccttatgaatgtcacgattgtgggaaaaccttcaggaagagctcctatctgacacagcacgtaagaactcatactggagaaaaaccctatgaatgtaacgagtgtgggaaatccttcagcagtagcttttctcttactgtgcacaagagaatacataccggagagaaaccctacgagtgcagtgactgtggaaaagcctttaataatctctcagctgtgaagaaacacttaagaactcacactggagaaaaaccctatgaatgtaatcattgtgggaaatccttcacaagtaactcctatctttctgtgcacaagagaatacataatagatggatatgaattactgcaggaacttctggaggaaagcactcattgatctttcatccctaagatagtttgagagagctcacactggatatataagttatttgttgcagcataacaaatgatccccgcaaattttgtggcttcaaacacgaaatgtttattctctaacaatttctacagatcaggaattcaagaacagcttatctctgtagttacactgcaggatctctcatgcctttacttacaatcaagatgtcagccaaagctatagtcatctaacatctttactgatgaacagtccacttccaagatgacttattcacatgcctggaaagttgatgttggttgttgtcaggggaccttcagtcattaccatgtaggcctctttacaaggcccagctccttgacaatttggcaataagttctcgccaaggttagtgatccaagagaggaccaatacagaggccaaaatggcttttatgacctatcctcaggaggactgctaagctttcacttatttcctattgtgttggtctcacaacacaccaatcctgatacaatgtgagagactgcagaaggtatgaataccaggaaacagataactcagaagcatctgggaaatttgccatggaattaatgaagaaaagccctcagcacatcatccttctactctaatcaatatgaaatagcattcagtaactcctattaattcactctgaagagaaaccttttgaggacaatctgtatggtaaagctctcagctcgaattctcaccttcatgggcccagaagattatgtactgagagaatcctgaagaatggaacagctgtagaaagccttcagtgctatcagcagggattcatgtgacagctcacactaagggagaaaacctgtgaaggtctcagaaggcttcagtgacagtcatcccttaagacgcactggaaatcacacaatggaacaacactcagaaatgcggaataccctacagcaaaagtgttcacattactgagcaaactatagtgtggtattctgcagtgactatgggaaagccttgaatgttctatcggtttttaagggacttgagaattaattctggagagaatgccccattgaacatcatcaatattggagagctttctgtttttctacatttgttaggaaacttgtgagcattcacactacagagaaacttgaaatataaagaagaagagaaagccttcagtgatgcctctgtgttagggaaaatatggaacttctccctggatgcaaaacctatgagtatattaatattggaaaatttttcagtgattcttctctttcttgtatatgagagaacttatatggagaaacccctaggaatgtaatcagtgttaggatgcctcagcctgaactcttcactgagtggccacaattttcactgggaacaaaaagtataatcactgttttgagtgtgggatatcctttatcagtgtctcatctgtagattggactgctggctcattaatttttttagtctttttttcttttaatataaacatttgtgtatagctgttccctaaaataaacattaacatatttcataattttaatgcaatgtatttattataattaatttgcttgttaaagacatccacacattgcatattcaaaaagttatttccaaataccttctgagtgattcagtttatcataatggaaattagtatttataaacacatttttctaatgtagtggtatttttggcagagtacatgagctttatgatactgattattttctctctatcttggtatgccaaatactgttggtttctttcccagtgtccgttctcttcagtttattcgtttaaagaaacaaacatgttgttcaagttgtctgtgaacaatatcgaaagttctcaatcttatagtttttcctgaagcccaggcgggttttttcgcactcccctggcaatgagaagtaagtcgaagtcactgtgtggaacatctcctggcttgttctcctcacatattttccattcacctcacccattctgtctcttggaaagtggcctcaaggtctagagtttgaagagcttctttttgaccacaatgacagaaaccaaagtgcagccaaaaatcacaatgctttgggctctccaggagcctccgattggctgcatctgctctggactccttattcttatacttcttatgtgactaaaagaaacccctaggctgggtgtggtggctcacgcctttaatcccagcacttttgagaggctgaggtgggtggatcatgaggtcaacagattgagaccatcctggccaacgtggtgaaaccctatctctactaaaagtataaagattagctgggtgtggtggtgcacacctgtattcccagctactcgggaaactgagacaggagaattgcctgaacctgggaggtagaggttgcagtgagccaagatggcgccagtgcactccagcctggcaacagagcgagactccatctcaaaataaacaaataaatatttttaaaaaaagaaacccctaactgattgaagccaacatgatctgttgtttgtttttgaggtggtgttctgttaacttccagcaggatgcagaatctaactggtaaacctataaattggtcaagttttacccatgttgtttctttgaaaacaatgtatattctctaatatttggatatagggtatatgaacattaatgcaacttaattgtatttccaagtacagtacgtatgttcagatttctttttctaaccttatttagtgatagaggtgtggtaaactcttccattatgtttatgtattaacactgtaattttgtcatttttatatattttgacattatgtaactagatgcatacaggattaggtattctgtattcctttttatgtggagatgatatttttacatagcaaagtattgtaatgcattaataataaatggtcaaacatttatttatttatttatttattttagatggagtttcactcttgtcatcaagggtggagtgcaatggtgcgatctcggctcactgcaaccttggcctcccaggttccagcaattctcctgcctcagcctcctgagtagctgggattacaggcacctgccaccacgcccaggtaatttttttatatttttagtagagatggggtttcaccatgttggccaggctagtctcgaactcctgatggtcagacatttatattgcacttcccatagatcaggcccccttctaaatgacatataagtattaactcagtatgcattataaacttaagtatgtaatgttattatccccagtttacagatgagaaaactggtatgatacacttaagttacttgcctgcattcactgactggtaaatggtagagccaagatctgaacccagacagtccatgcacttaaccactaccctattaacggagtatgttctgtgtgccaggcaaagttttgccattgaaatacttcacctaatggaggaggaacagattatagaaaaatcaagaaaatatggtattatagagttataggaaaaaaaagcattttaggagagttaaggggggttgggaataataattttatataactaggaaaagaaagcctcttggtaaggagcatttgagcggagatctcaacaagttgggacagtgagtcatatgaatttgtcttgcaagagtagtgttggcatgcaaaggcccacaacaaggaggccaatacagctggagtggaacaaaggggtgatgagggagcagtaaaagatgatgtggtcagagacatggtagatcctgatcttgttgggttttctgagacattgttaggacttttccttatttcagtgagttggcacatcagtcagggtcccagcaggaactcaggttgacacccacagactaggacaattcaagtagagttttcataaagggtctactcagtcctgtggacaggatccagggaaaccacaaaaagttgtaaagcacccagcagcttagcagggcagagctctaacacctcacagcctgaagggacgaagggagggagcaactgaatctggagacgagaggagagggctgcattccaggagctgagagaggtcagtcagcgatagcatccagccccaggtcctcctgcaggaaatagccagggtcagacctcactctccttcatccattgagacaggaaaatatccccatttatgaatatataaatcaatagcagatccagagacaatttgggtattggagttagcagacaaagactttaaaataaccaagaataatatgttaagggaaatggaggaaacatggacaaaccatagaaaatgagagacaaactgcaaatctaccaaacaaccaaagaagaaggacacattgctttcaaagcagcatcagtaagactaatgatgacttttcaaaagaaactatggaagcaagaagacaatgaatgacatctgacatataaagggttaaatgggttggaggagggggaaattgtcaatcaaaagttctgtaacctaagaaaatattcttcaaaactgaaggcaacaatgttttccaatgggagggaatatttttttttttttttttgagatggagtctcactctgtcgccatgctggagtgcagtggcatgatctcggctcactgcaacctcctcctcctgggttcaagtgattctcctgcctcagcctcctgagtagctgggactacaggtgtgtgctaccacgcccagctaatttttgtatttttagtggagacagggtttcaccatgttggccaggatggtctcgatcctttgacctcacatgatttgcccacctcggtctcccaaagtgctgggattacaggcgtgagccaccacgcccggcctgggagggatttttttaagctgagagaattaacagcataaccgtattttcagaaacactgaagagatttcttcaggcttcaggaaaatgattccatagagacatacataattccaggaattaagatcaacaggaaacataagatgcaagtaaatataaatcagtactgactgtataaaacaaccctgtatagttttacaacttttatgtatatctaaactttccaaaataaaatgcttttaaaaaca

SEQ ID NO: 160 - protein, 402 aa, Homo sapiens
MAAVILPSTAAPSSLFPASQQKGHTQGGELVNELLTSWLRGLVTFEDVAVEFTQEEWALLDPAQRTLYRDVMLENCRNLASLGCRVNKPSLISQLEQDKKVVTEERGILPSTCPDLETLLKAKWLTPKKNVFRKEQSKGVKTERSHRGVKLNECNQCFKVFSTKSNLTQHKRIHTGEKPYDCSQCGKSFSSRSYLTIHKRIHNGEKPYECNHCGKAFSDPSSLRLHLRIHTGEKPYECNQCFHVFRTSCNLKSHKRIHTGENHHECNQCGKAFSTRSSLTGHNSIHTGEKPYECHDCGKTFRKSSYLTQHVRTHTGEKPYECNECGKSFSSSFSLTVHKRIHTGEKPYECSDCGKAFNNLSAVKKHLRTHTGEKPYECNHCGKSFTSNSYLSVHKRIHNRWI

SEQ ID NO: 161 - DNA, 1799 bp, Homo sapiens
agttagctccgcaaggacccggacgcgaccaggggaggcagaaggactctgcacttgtccaagagaagaatccagagaaatcagagcaggtcaaatagttctaaaagccatggcccagggactggtgacattcagggacgtggccatagagttctctctggaagaatggaagtgcctggaacctgctcagagggacttgtacagggaggtgactctggagaactttggtcacttggcctcactaggactctccatttctaagcctgatgtcgtctccttattggagcaagggaaagagccctggatgattgcaaatgatgtgacaggaccatggtgcccagacttggagtccaggtgtgagaaatttctacaaaaagacatttttgaaatcggggcattcaactgggagataatggaaagccttaaatgcagtgacctggagggctccgattttagagctgactgggaatgcgaaggccagtttgagagacaagtcaatgaagagtgctattttaagcaagtgaacgtcacctatggacatatgcccgtgttccagcatcacacgtctcacactgtacgtcagagcagggagactggtgagaaactgatggaatgtcatgaatgtgggaaagcatttagccgtggctcacaccttattcaacatcagaaaattcacactggtgaaaaaccctttggatgtaaggaatgtgggaaggccttcagccgtgcctcacaccttgttcagcatcagagaattcacacgggtgagaaaccttatgactgtaaggactgtgggaaggcctttggtcgtacatcagaacttattctacatcagagacttcatactggtgtcaaaccttatgaatgtaaagaatgtgggaagacctttaggcagcattcacagctgattctgcatcaaagaactcacacaggcgagaaaccctacgtatgtaaagactgtggcaaggctttcattcgtggctcccaactcactgtgcatcggagaatccacacaggggccagaccctatgagtgtaaagaatgcgggaaagcctttagacagcactcacagctgactgtacaccagcgaatccacactggtgagaaaccctacgagtgtaaggaatgcggaaagggctttattcacagctcagaagttactcgacatcaaagaattcattctggggagaaaccctatgagtgtaaggaatgtgggaaggccttcagacagcacgcacagctcacacgacatcagagagtccatactggcgacagaccctatgaatgtaaggactgcgggaaggcatttagtcgtagctcatacctcattcaacatcaaagaattcatacaggtgacaaaccctacgaatgtaaggaatgtgggaaggcctttattcgtgtttcacaactgactcatcatcagcgaattcacacttgtgagaaaccctatgaatgcagggagtgtggaatggcctttattcgtagttcacaacttaccgaacatcagagaattcatcctggtatcaaaccttacgaatgtagagagtgtgggcaggcatttattcttggctcacaactcattgaacactacagaattcatactggttagaaagccttgagtgtaagggataaagataagcctttatgtggagttcacatctggctcagtactaggtaatttttaatgtagtgtaattaatgtcagaaaacacctgtcacttccatcatagaacatcagaaaactcacacccaaagaaaattaaataaatgtgggaattctttttgcctcactcactgtt

SEQ ID NO: 162 - protein, 499 aa, Homo sapiens
MAQGLVTFRDVAIEFSLEEWKCLEPAQRDLYREVTLENFGHLASLGLSISKPDVVSLLEQGKEPWMIANDVTGPWCPDLESRCEKFLQKDIFEIGAFNWEIMESLKCSDLEGSDFRADWECEGQFERQVNEECYFKQVNVTYGHMPVFQHHTSHTVRQSRETGEKLMECHECGKAFSRGSHLIQHQKIHTGEKPFGCKECGKAFSRASHLVQHQRIHTGEKPYDCKDCGKAFGRTSELILHQRLHTGVKPYECKECGKTFRQHSQLILHQRTHTGEKPYVCKDCGKAFIRGSQLTVHRRIHTGARPYECKECGKAFRQHSQLTVHQRIHTGEKPYECKECGKGFIHSSEVTRHQRIHSGEKPYECKECGKAFRQHAQLTRHQRVHTGDRPYECKDCGKAFSRSSYLIQHQRIHTGDKPYECKECGKAFIRVSQLTHHQRIHTCEKPYECRECGMAFIRSSQLTEHQRIHPGIKPYECRECGQAFILGSQLIEHYRIHTG

SEQ ID NO: 163 - DNA, 2802 bp, Homo sapiens
agacgcccggccggcaaccgaaggcagtctttagctctcatggattgggagctgggaaaggaatgagaagacagaagtcagagacaagaagaggctaacatgactgataccactataatttagtgaactgcctcttttctaaagaggactccaaaggaaggactggtcatctctttcatatctcaaaaccatggctcagggatcagtgtctttcaatgatgtgactgtggacttcactcaggaggagtggcagcacctggatcatgctcagaagactctatatatggatgtgatgttggaaaactattgccacctcatctctgtggggtgtcacatgaccaaacctgatgtgatcctcaagttggaacgaggagaagagccatggacatcatttgcaggtcatacctgcttggaagaaaactggaaagctgaagactttttagtgaaattcaaggaacaccaagagaagtattctagatcagttgtaagcatcaaccacaaaaaactggtgaaggagaagagtaaaatatatgaaaagacatttactctaggcaaaaaccctgtgaattcaaaaaatctacctcctgaatatgatactcatggaaggattttgaaaaatgtttcagaattaatcatcagtaatctaaatcctgcaagaaagagacttagtgagtataatggatatgggaaatcactcctgagtactaaacaagagactactcatcctgaagtcaaatcccataatcaaagtgccagagctttcagtcataatgaagttcttatgcagtatcagaaaacggaaactccagcacagtcatttggatataatgactgtgagaaatcattccttcaaaggggaggcctgattacacatagtagaccttacaaaggagaaaacccatctgtatataataaaaaaagaagagcaaccaatattgaaaaaaaacatacatgcaatgaatgtgggaaatctttctgcaggaaatcagtattgattctgcatcagggaattcactcagaagaaaaaccctatcaatgtcatcaatgtggaaatgcatttagaaggaaatcatatctcattgatcatcagagaactcacacaggagagaaaccctttgtttgcaatgaatgtggtaagtccttccgcctcaagacagccctcactgatcatcagagaacacacacaggggagaaatcgtatgaatgtctgcaatgtaggaatgccttcagattgaagtcacacctcattcgtcatcagagaactcacacgggagagaaaccatatgagtgtaatgactgtgggaagtccttccgccagaagacaacactctctctacatcagagaatccatacaggtgagaaaccctacatttgtaaagaatgtgggaagtcctttcaccagaaggcaaatcttactgtacatcagagaactcatacaggggaaaagccctatatttgtaatgaatgtgggaaatccttctcccagaagacaacccttgctcttcatgagaaaactcataatgaggagaaaccctatatttgtagtgaatgtggaaagtccttccgccagaagacaacccttgtagcacatcagagaacacatacaggggagaaatcttatgaatgtcctcactgtgggaaggcctttagaatgaagtcatacctcattgatcatcaccgaactcacacaggagagaaaccatatgaatgtaatgaatgtggtaaatcattcagtcaaaagacaaatctcaatctacatcagagaattcatacaggggagaaaccctatgtttgtaatgaatgtgggaagtcctttcgccagaaagcaaccctcactgtacatcagaaaatacataccggccagaaatcctatgaatgtcctcagtgtgggaaagcctttagcaggaagtcatatctcattcatcatcaaagaactcatacgggagagaaaccatataaatgtagtgaatgtggaaagtgcttccgccagaagacaaatcttattgtacatcagagaactcacacaggtgagaaaccctatgtttgtaatgagtgtggtaagtctttcagttataagagaaacctcattgtccatcaaagaactcacaagggagaaaacattgaaatgcaataaatgatgtggtttcttatatgaattctttacaagctgttgtaaacatttagttttaaaaagaaaagcatgctgaaacatgttaatgtaattttaaatcacaagtctaataattattaaagtaccatacggaataactgtctactgtttactagcatataaaataagtatgatcattattattgaactctatcagctatgaagctaaattttaaagtcaactgctcttcctactgactcaaatagtttattttttaaaaatacttatataatacatgcagagacaagatacacaatgattataagtattaatctccataagagaaaatatttatgaactatatttctcattgcactctgtaataaaaagcagttagttgttacttacctaagagttaccacttccgtagcctataacatcaaaacgtagtttttgcatgttttcaattttataaatatatattttatcagacatcatgaattattttgtgtcttgcttatttcactcaattttttaagatctgtacattattgcatgtggcagtagtgtattttcattttgcatactattccattttaagaatatattgctgtttatcctattgatggatatttgtattttttatacttttgtgtaataataaaaatactgctgtaaatattcttgttta

SEQ ID NO: 164 - protein, 647 aa, Homo sapiens
MAQGSVSFNDVTVDFTQEEWQHLDHAQKTLYMDVMLENYCHLISVGCHMTKPDVILKLERGEEPWTSFAGHTCLEENWKAEDFLVKFKEHQEKYSRSVVSINHKKLVKEKSKIYEKTFTLGKNPVNSKNLPPEYDTHGRILKNVSELIISNLNPARKRLSEYNGYGKSLLSTKQETTHPEVKSHNQSARAFSHNEVLMQYQKTETPAQSFGYNDCEKSFLQRGGLITHSRPYKGENPSVYNKKRRATNIEKKHTCNECGKSFCRKSVLILHQGIHSEEKPYQCHQCGNAFRRKSYLIDHQRTHTGEKPFVCNECGKSFRLKTALTDHQRTHTGEKSYECLQCRNAFRLKSHLIRHQRTHTGEKPYECNDCGKSFRQKTTLSLHQRIHTGEKPYICKECGKSFHQKANLTVHQRTHTGEKPYICNECGKSFSQKTTLALHEKTHNEEKPYICSECGKSFRQKTTLVAHQRTHTGEKSYECPHCGKAFRMKSYLIDHHRTHTGEKPYECNECGKSFSQKTNLNLHQRIHTGEKPYVCNECGKSFRQKATLTVHQKIHTGQKSYECPQCGKAFSRKSYLIHHQRTHTGEKPYKCSECGKCFRQKTNLIVHQRTHTGEKPYVCNECGKSFSYKRNLIVHQRTHKGENIEMQ

SEQ ID NO: 165 - DNA, 8291 bp, Homo sapiens
gaaacttgcgagtgtcgcgtctgcagtgtgtggggttcgcggggcggcgggtagaggcgagtgtttagagacttcgggtccctgactcgcctccagcagtggagacaggtcatcggtctggtctgcgtgggcttctgggaatgtttcaggggcagggagagcgcgcttttttttttctgttgttcgctagcgcgtgaggtccgtgttgcggggagctctcggggagtcctcgctcggagttcgtttcgcagtcgtgttggagttcccagagtctgggagcccatggtctccgcattggaaccagtgcttgggaggtcttcgttgcacagtagcgctagggcgtcgtggtggggaagcgaatcgtgtcagtgttggagactgctctgggcagttcgtgttcattgcttatcacatgcgtacttaaaaaggggtctgctggtccccttgcttccctgctgctgtatattctgtagaaaatgggttttcaggttcattgcgacccaagtaataacatccccatcattttaaatactcctccagaaaataactctggtttagtgtatttcatgtttaatgttgggatcaggtgtctaggtattggtataattttattcgtctttaataacatcttgtcaacttcgtattcccatattacatgctctttgagagttttttaaattgctgcagtttcatcaagtggttgctttaatttgggtagaattgatgtagatctagatacaacactttcaggaacatgtgatggatttctattaacccaatatttttatttgtttgactatctgtagtgtttttccatacgtatcttggacatttctggttatgcttatttctacatagttaatactttttgttgtaaatcgtgactttttttttgcataagacccctccccctttccttttttgttcctaattttacttagttgacaagaacagaagttaaaaatatatatgtttattctgtcacttcattgtactcatgtcattacatataacttataaattgacgtcttttttctagttgagcatttttgtcatctgcaaataattttagccaggtggcaagtgtatggactgtggagtaagaagtacctgcctctgcctctgacttgggttctggcctataggaacaagacattttcagtaatggaagaaggagcttccaggctggggaagatcatcatttccagtggtagcttgacctgagatgatacctgaccaccacttctgggaaggcccagaatagacagaagagagagaacatactagagttgctagcccctaagagttgaacgaaatgggcaaggcccagctgaaataacaggaaacacatgaaaaatgccacgattgtaatgtctgtgaggagagagcaaggcagttcttcaggggaggggtcattgtcattcgaagatgtggctgtgggcttcaccagggaggagtggcagtttttggaccagtctcagaaggtcttgtacaaggaagtaatgttggagaactacatcaacctagtatcaatagggtatcgaggcaccaagccagattcgctcttcaagttggagcaaggagaacccccagggatagcagaaggagcagcccacagtcaaatctgtccaggttttgtaatccagagtagaagatatgcaggaaaagattctgatgcatttggtggatatgggagatcatgcctccatatcaagcgtgacaaaactcttactggagttaaataccatagatgtgttaaacccagcagccctaaatcacagctcaatgacctacaaaaaatttgtgcaggagggaaaccacatgaatgcagtgtgtgcgggagagccttctccaggaaagcacagcttattcaacatcagagaactgaaagaggagagaaaccccatggatgtggtgaatgtgggaaaacattcatgaggaagattcagctcactgagcatcagagaactcacacaggagagaagccccatgaatgtagtgaatgtggaaaagccttctccagaaagtcacagctcatggtccatcagagaacccatacaggagagaaaccctacagatgcagcaaatgcggaaaagccttcagccggaagtgccggctcaatagacatcagcgatcacatactggagagaaactctatgggtgcagtgtgtgtgggaaagccttttctcagaaggcatacctcactgcacaccagagacttcacacaggagataagccttataaatgcagtgattgtggaagaaccttctattttaagtcagacctgaccagacatcagaggattcatacgggagagaaaccttatgaatgtagtgagtgtgaaaaagcctttagaagcaagtcgaagctcattcagcatcagcgtactcacactggagagagaccatattcatgcagagaatgtggcaaagcctttgcccacatgtcagtcctcattaaacatgagaaaactcacataagagagacagccataaattcactgacggtggagaaaccttcctcaaggagtcatacctccttatacatgagcgaactcatacaagagcaaaagactgtgaacacagtacctatagaaatgccttcctcaggaaccccgccattgttaaacaagagtgagcgcctagtgggcagaaatgtagtgattgtggaacaaccttttccaagaaatcaagcctttgtagttaatcaggaatttgaacagagaataagcctcacaaatgaagtgaatgtggccccatcagtaataaattatatcttgtatcttacagatattgtatcagaataaatcttctgataccagaaaggtgggaaaatctttagtaggaatcctccagccattatatcccagagagctcatttagggctgaaacactgtggaggcagtggttgtggaggacatttctgtgagaagtcaaacctgttaaacaccattgaaatcatgttgggtagaaatgcagctgttatgaggaagtctttacctggagatgatatctcaattggtatcaaaagaattcttacaggaatatttatgaaagattgtgatggtgcttttagcgctaaattgtgcctcgtgtgccaaagaaacatagacaactgtagaggcaatggatatggaaaacatttttcgtaaaatatgggagaatttgtagaaaagaaaaactcttgaaagtaagaaatgatggcaactcaccaaattaactcatgtatcatacttttatgtcttgagagtcttggagggacgtgtttaatgaaatcttgaaccccaggaatagtattatgtaatgaaaacctatgaatataacaaatatggaagtaaaattgtgttagttttttatgagtgttgcaccaaactaacacaaatttaatggcttaaaacaacacaaaatcattatcttacagttctggaggactgaagtccaaatgcatctcacggggctacatcaagctgttgacagggctgcttttctttttggaggctctaggggagcgtctttctttgcccttccagcttctagaagctgcccaaattctgtggtttggggcctcctttcaaaaccagcaatggccaatcagtcttacatcactcaaacacttgagtgttctgtctccctcttccatgtttgaggacccttgtgattacactgtgaaaacccagataagccaggataatctccctatcttattatgaggcaagtatgttaagattttattctataatcagagaatcttatgctatgattgttatatgtgagcattatagatgctcttgaaatgttaaaatcacatcagcactggaaaataactcctaaatgtccaaaaagaacatgagatttatggtgcttgaaatgttgctaaacgtaaatttgtatctattctgaaattatataaattaacctacctggccaggcacagtggctcacacctgtaatctcagcactttgggaggccaaggcaggaagatcacttgagcccgcaagtttgagaccaccctgggcaacatagcgagactacctctacaaaaaaaaaaaaaaataataatagctggacatggtggtgtgtgcctatagtcccagctacttgggaggctgaggcaagatgattgcttgagtccaggagttctaggctgcagtgactgcagtgagctatgatcatgccactgcactacagcgtgggtgacagaataagactctgactctaaaaaaggggggaaaagaaactaacatacttcattatgagtacggaatgcatatgacataatgcacctggatattgactaactttttcatagccaacccaaacagtccctttttcttttacagtaaatgtctaatgtatataatctcctgccttaaatatctaaaaaagatgcacaaaatatatgaatgaacttcatcagacattgagaagtaaagggcttaggacagctttccatgacagaaaggaaacaatgagatgagccttatgattgccccagcttagtgcctggagaaagtttccagtctgcaggattgggaggagaaacccaagcagatcccagccatctctctgaattgagacagagtttagggtttgaggaattcaaggtggcccaaattcatgaattggattattggagaagagctgcactcaagaattgagagttctgtagagtttcccccacaagccttttgagtcataatcagcatatgtatgtgagaaaccccccctaggctggaggaagaacaggaagaaatgaacacgcagaaaaatccttggattacacacaagcatttccaccagctggagtggaaacgcctcctaacatttggagaatcacagtggaccttaagtaaggagtattgcctctgtgggtggctcagatttgctctacagtaaaggctgcctcgaactctcctcacaaagcatacatgcaagccatgaaaaggccatactttccaagtaagttagcaattttccaaacagagactaataaagaaatagaaagcaatctaccagtcagtaattgaccatgtctggcatccaatacaaacttacccaggtgtgcaaagaagcaggaaaatataaccccataacatgaagaaaactcagtagagacccagaagtggcacacttatagcagaaaaggatgttagaaatagctgctataaatgtcccatatgaatcaagtggattataaaaactataatttactgatgggttccccccacctgaacaaggggcagatgaagctcagtctacgcactggacccaatgcccctaggatgttaatcctcccagggagggaccagaaggaggcaattaccagcaatcagcaccaggttccctgagagggagaagcaagctcagctgaatttgtgcagtgtagtctacccggtgtttagcccctctttgccttctctgggaactgaggcttttgaacagggctgctgagcttcctaggaagtgtagtttggccatgggcagtgcttgagacacctgtgctgggcagttgaggtttatgggaagtacagttaggaggcctaacaacttattctagttagcggctggtgtgtcttgactgtttagcccctgtaggggtttctggcacacatctgcctttggccatttttctccacattgaaggggtccagcccgtccacacctgtgggtgtttctcgtcaggggggacgagagactgagaaaagaaataagaaataagacacagagacaaagtagagaaagaacagtggccccaggggaccggtgctcagcatatggaggacccgcaccggcactggtctctgagttccctcagcatttgttgatcactatctctaccatctcggagagggggatgtggcaggactatagggtaatggtggggagagggtcagcaggaaacatgagcgaaggactctgtgtcataaataagtttaaggaaaggtgctgtgcctcgatgtgcacataggccagatttatgtttgactttacacaaatatctcagtgcagtaaagaacagtatcgctgccagcatgtctcacatccagccataaggtggttttctcctatctcagcaaatagaatgtacgattgggtttcacaccaagacattccattcccagggacgagcaagagacagatgccttcctcttatctcaactgcaaagaggccttcctctttcactaatcctcctcagcacagaccctttatgggtatcgggcttggggacggtcaggtctttcccttcccacgaggccatatctcaggctgtctcagtggggagaaaccttggacgatacccaggctttcttgggcagaggtccctgcggccttccgcagtgcattgtgtccctgggtactcgagactggagaatggtgatgacttttaccaagcatactgcctgcaaacacattttaacaaagcacatcctgcacagccctaaatctagtaaaccttgagtcaacacagcacatgtttctgcgagcacagggttgaggctagggttacagattaacagcatctcaaggcagaataatttctcttagtacagatcaaaatagagtttcttatgtcttcctttttctacatagacacagtagcagtctgatctatctttctttcccccacacacatgagtgaattctatctgggtgttcaaggcagttgaagacggtagtagtcagaaccttagccggtgcttgctggggcttctgtaggcaacattatgagggaattggccttgggcatattaattctgagctcatctggcagttctgctttggctggggcagtctttggtgggtcagacccagtcggttcttggtgagtctgccctgctgtgtggctgaggtgggaagcagtcctacagaatcccattgttgtgtgggacatgtttgcccttgttcttcctgctctcatgggccagatggatcccatgttggaggctggggaggggactcagggcatgggtcttacctaaccttactctgctgactttctccttttacaccccagatgaaacttttttaggtgtgtaggtgtctgtgtcctatggagtgtccggaactggcctattaacaactgcatcactgttaacagaaagcttctagaacagtgtctacaatgcagtgctttgaggactaagtcagcaacttttaaaaagaacttctattacaagtgggaagatgatttatgtataaagaaatttgacacacttaaaaacctacaactgctggtgcacagatttacagattccatccactttgtcttgattcccagtttagaacttgggtctgtaaatactagaacctgccagacctcagagtagaaatccagtgtcagctctcccaccagaacttgcctggctctgatcccatgcaagggagaagacattccaggttctcattgcctttttctgtatctgtatttaggggtgggggtagaggactagaaattcctcattggtgctgattagtctgacctctgagggctttttccaaccctagctttgttctttttgtttgtttgcttgtttttgttttttgtttatttgagatggagtttcgctcttttgcccaggctggagtgcagtggcgtaatcgtgggtcactgcaacctccaccttccggtttcaagtgattgtcctgcctcagcttcctgagtagctgggattacaggtgcctgccaccacacccggctaatttttttttttttttttgtatttttagtagagacggggtttcatcatgttggccagtctggtctcgaactcctgaccttgtgatccgcccacctcagcctcccaaagtgctgggattacaggtgtgagccaccgcgcctggccagctttgtgtttttaaaaagttgtccttcattaagggagggaaattgagtaattgtcacaattctaaaagctgggcctctctctgacatgtcttcttttctcttgaaaagagatcttttgtccgatgttcagaatcagaaaagacaatatctagatcataccttagaaatgatatccttttcctaagaaccgaagaaaaaaacgataaaagccccggtgaggttttgcttctttcttttgcctttctttccaatgactttgcaaggcttaagacaaataactattaaatggaaatacatacatttgtaatttaaaaatttaaggaaaactaaacagaaaccataaaatcaagattcaggtaaaggtggaatgaggaaatgtagcttcatacagagtgccttaagtgtgaatacaggtgaataaatatgtaagaatgtatgatgta

SEQ ID NO: 166 - protein, 485 aa, Homo sapiens
MKNATIVMSVRREQGSSSGEGSLSFEDVAVGFTREEWQFLDQSQKVLYKEVMLENYINLVSIGYRGTKPDSLFKLEQGEPPGIAEGAAHSQICPGFVIQSRRYAGKDSDAFGGYGRSCLHIKRDKTLTGVKYHRCVKPSSPKSQLNDLQKICAGGKPHECSVCGRAFSRKAQLIQHQRTERGEKPHGCGECGKTFMRKIQLTEHQRTHTGEKPHECSECGKAFSRKSQLMVHQRTHTGEKPYRCSKCGKAFSRKCRLNRHQRSHTGEKLYGCSVCGKAFSQKAYLTAHQRLHTGDKPYKCSDCGRTFYFKSDLTRHQRIHTGEKPYECSECEKAFRSKSKLIQHQRTHTGERPYSCRECGKAFAHMSVLIKHEKTHIRETAINSLTVEKPSSRSHTSLYMSELIQEQKTVNTVPIEMPSSGTPPLLNKSERLVGRNVVIVEQPFPRNQAFVVNQEFEQRISLTNEVNVAPSVINYILYLTDIVSE

SEQ ID NO: 167 - DNA, 4916 bp, Homo sapiens
agggctgcggcgcctttgtgagcgcggccgccggccaggatcgagccctggcccgggccctggcccagccccggcctccaaggaccgcgccgaaggaggtgcccactggagggaggaggcgctcgactttctcaggatactgtccctctcccacagaggagctgaaggagtaggacagaagaactgtcaaattctggaatccttaaagccatgtccaaggatttggtgacatttggggatgtggctgtaaatttctctcaagaggaatgggaatggctgaaccctgctcagaggaatttgtacaggaaagtgatgttggagaactacaggagcttggtatcattgggagtttctgtttctaagccagatgtgatctcattattggagcaaggaaaagagccctggatggtgaagaaggagggaacaagaggcccatgccctgattgggagtatgtatttaaaaacagtgaattttcatcaaagcaagagacatatgaagaatcatccaaagttgtgacagtgggagcaagacatcttagttatagccttgactatcccagtttgagagaagactgtcaaagtgaggactggtataagaaccagctgggaagtcaagaggtacatcttagtcaattaatcatcactcataaagaaatccttccagaagttcaaaataaagaatataacaaatcttggcaaacattccaccaggatacaatctttgatatacaacagagttttcccaccaaagaaaaagcacataagcatgaaccacaaaagaaaagttaccgaaaaaaatctgttgaaatgaaacataggaaagtctatgtagaaaagaaacttttgaaatgtaatgattgtgagaaagtcttcaaccagagctcatcccttactcttcatcagagaattcatactggagagaaaccctatgcatgtgttgaatgtgggaaaacgttcagccagagtgcaaacttggcgcaacataagagaatacatactggagagaaaccctatgaatgtaaagaatgtaggaaagccttcagccagaatgcacacctggcccaacatcagagagttcatactggagagaaaccttatcagtgtaaagaatgtaaaaaagccttcagccagattgcacacctgactcagcatcagagagttcatactggagagagacctttcgaatgtattgaatgtggaaaggcctttagtaatggttcatttcttgctcagcatcagagaattcatacaggagagaaaccttatgtgtgtaatgtgtgtgggaaagcctttagccatcgtggatacctaattgtacatcagagaattcatactggagagagaccctacgaatgtaaggaatgtaggaaagccttcagccagtatgcacaccttgctcaacatcagagagttcatactggagaaaaaccttatgaatgtaaagtatgtaggaaagccttcagccaaattgcataccttgatcaacatcagagggttcatactggagagaaaccctatgaatgtattgaatgtgggaaggcctttagcaatagttcatcacttgcacaacatcagagaagtcatactggagaaaaaccctatatgtgtaaggaatgtaggaaaacatttagccagaatgcaggccttgctcaacatcagagaattcatactggagagaaaccttatgaatgtaatgtttgtgggaaagcatttagctatagtggatctcttactctacatcagagaattcatactggagaaagaccctatgaatgtaaagattgcaggaaatctttcaggcagcgtgcacatcttgctcatcatgagagaattcatactatggagtcattcttgactctttcctctccctcaccctccacatcaaatcagttgccaagacctgtaggtttcatctcctgaatatttctggaatccacctcttgaatccatttccatcccatcatccttgtccaatgcacattaatatatttgacatgggatactcgagtagctttctaattggtctccttgtactcaccattgtctctgtcagatgtccacattgcaaccaaatttgtatttttaaaaatatgtttaatctcatttctccctcattaaaatccctcagtggcatcccatggtttttaagttaaagcacacattcttcaaaatagcctaaaaacctagcctctaacaccttgttccaggttaccttccaaagtttctatcttgtgtcactatccatctcattctctgaatacttatccaggattaagatacatattccaggatcaaaaagacctgggttccaatctttgcacttccatttcctgccctctaatttgggggcagcagtttgtgctttgtaagcttcagtcttatttatagtgtgggaataataatggttctacctcagaagttaatagaagaatgaaataatgcatgtaaattgctcagcagcgtgcctagcataaagtaattactcaaaccataatgtaaagtaaaaagataaccatactatacatagaaagccaatcatctcagccatgattatctcagaaataaaaagagatgcagcagctcaggactgagagattgtgaagtttttttttttttaggaatggtaggcatttttctaaaagtaggtgaggagggtatctaacagtaggatttacattagagtccatgatatagggtaagatggtggcttgtatcagcattcactggatatttaacagttctaagatgctaatgtcttattttaaaagtctttttttttgagatggagtcttgctctgttgctcaggcttgagtgcagtagtgcaatcttggctcactgcaacctccgcctcctgtgttcaagtgattctcctgcctcagcctcctgagtagctgggattacaggcctgcaccaccacgcccagctaatttttgtatttttagtagagagagggttttgacatgtcggccaggcttttctctaactcctgacgtccggtgatccgcctgccttggcctcccaaagtgctgggattacatgcgtgagctaccgtgcctggcctaaaaagtcatttttaataagacagtttactgagatgtattcatcatttacatgtaaacaaaggcaaaatcgaaattaaaaagaaatcttgaaacaagtcagtaaccaatgatgagtagaaaataaagtataagtttgaacccctgttctaaatctgggtgaatgaattatatcaaatctatgtcatttaaaataataaaggttgttaaattactaaaatttcaaaactagtgaagaaaagaaaccaaaactgtaggtcagttctcataaactggcccacaaacatgtttgattctgtatgcattaagtttaaaatacatatgaataccttcagcagaccatgtgttttccctttctccaacattcaaaccactccctgattctttacatctgacctcttttaatattacttcctgaccccagaattcttttggcatataatcaatgcagtgatcaattcacatgtgactatagatacaaacagaatgacgaaagtttaatggaggatgaaaaagaagacaaataaatattttatcctttatatggtaagacagattcactatcatactgatgtcagtagcccatgaattaatttacagattctacctaacaaaattctaataaattttgtaaggttttaacatgtatgtgtgaacatacatattcatgctgttacacatataaagaaaattataacaaaagtgacctataccatcagtggtttaacagttttggaaaaatttatcgtgctctatacaacaattcattccatatgtgaaagttactttcaagtgctttatctaaatgtggaacaaacagtgattagaggagtctgtgacacactctaatcatggaatgagactggccttcctaaacatgagattcagaagcctccccacctcctgtcaacaagtcatagatttgactgtataagaactttataaagcttttatatgatcaaagatagtaaaagatacaatattttttaaacctaagaatgggagaaaattattgcagcacatataaactatggaattcatatccttaacataaaattgctcataaaaatcccttaggaaatgacgcttttctccagctcatagtcaaaggatatgaagaggcaacaggtgaccaataaatatgtggtaagtactaaatctccctaggatcagaagaaatacagtttaggccaatgaaatactatttttttcaatatcagattaataaaactgcattgaaagcatacaaaaagagatactatgcactaatttaaaagagcatgagtttgtacaaactctggtaggcaatttgtcaacttcagaattttaattgggaaaagtagaattttattttgaagttcaaaaactcggcacacaatgtctttccctccagattctattatacacatagaacaatgtaaatgattcttaaaaaaaaaaaaaaggtgaggcttttgagtggatgaaataattttgtaaaaggcaaaacagggaagagtgttcatgaattgtagcagaagatgctgcatgttatatgcgaatgaccgaagggttttaaaaatggaatctagtctgcccaaaggatccctagagaagttcaggcttggagttggcttatgtacaggctgtggcttctaagaagacatgatgaaaagcctcttgaagcctttgtatgtgaaagttatgtcagtagcccttgccaaaagcctcctcactctcccctctcttgtataagtaaattgaatgggatccttatttcacaccattaacaagtataagttctaactgaataaaaatctaaatgtaaattactaaagcaaaagtattagaaaaaatatagtgggatatgttaacga

SEQ ID NO: 168 - protein, 569 aa, Homo sapiens
MSKDLVTFGDVAVNFSQEEWEWLNPAQRNLYRKVMLENYRSLVSLGVSVSKPDVISLLEQGKEPWMVKKEGTRGPCPDWEYVFKNSEFSSKQETYEESSKVVTVGARHLSYSLDYPSLREDCQSEDWYKNQLGSQEVHLSQLIITHKEILPEVQNKEYNKSWQTFHQDTIFDIQQSFPTKEKAHKHEPQKKSYRKKSVEMKHRKVYVEKKLLKCNDCEKVFNQSSSLTLHQRIHTGEKPYACVECGKTFSQSANLAQHKRIHTGEKPYECKECRKAFSQNAHLAQHQRVHTGEKPYQCKECKKAFSQIAHLTQHQRVHTGERPFECIECGKAFSNGSFLAQHQRIHTGEKPYVCNVCGKAFSHRGYLIVHQRIHTGERPYECKECRKAFSQYAHLAQHQRVHTGEKPYECKVCRKAFSQIAYLDQHQRVHTGEKPYECIECGKAFSNSSSLAQHQRSHTGEKPYMCKECRKTFSQNAGLAQHQRIHTGEKPYECNVCGKAFSYSGSLTLHQRIHTGERPYECKDCRKSFRQRAHLAHHERIHTMESFLTLSSPSPSTSNQLPRPVGFIS

SEQ ID NO: 169 - DNA, 2308 bp, Homo sapiens
gccttggcaacgacccagccgcgccgcgaggagagccgggaatggaggtcgtggcgtgaggggcgccgagcgaggggaggcgcgggccacgggagttccgggagttccggcgttgcccggcagtccgcagtcctcggcgggaaggctgtcccggcgcctcaggcagctctgcgtgggccggggtgacttcctcgcgatcccctgcgcgaggtgaagggcagggacctttgccgcgccttccacgcgccgtgccccaccggcgagtggctccatcttcctcagacttatcgctcgcggacaggcgccgtgggtctcccgggcctccgtaccgtcctccttcccagcggctccgggaagcggttccctgtcttcggacgcatttcacccgcgcggggagagcttcccgggaaggttccacggcggccgagggtttccgcgcccgggacgcgtttcggctgaggccgtgggtccagtccacgggttctgcccgcacggtccaatggccggggaggcggaggctcagttggacccatcattgcagggcttggtgatgtttgaggatgtgacggtatatttctccagggaggagtgggggctccttaatgtgacccagaagggcctataccgggatgtgatgctggagaactttgcactcgttagctcactgggacttgcaccttcgagatcccctgtgtttacccagctggaggatgatgaacagtcgtgggtgcccagctgggtggatgtgactccagtcagcagagcagaagccaggagaggttttggtcttgatggtttgtgtagagtggaggatgagagagcccatcctgagcatctaaagagctacagagtcatccagcaccaggacactcatagtgaggggaaaccaagaaggcacactgagcatggggcagctttcccacctggttccagttgtgggcaacagcaagaagtccatgtggcagagaagctgttcaaatgcagtgactgtgggaaggtgttcttaaaggcctttgccctccttgaccatctgataacgcattctgaagagagacccttcagatgcccaacaggcagaagtgctttcaagaagtcagctcatattaacccccgaaaaattcacactggagaaacagcccatgtgtgtaatgaatgtgggaaggccttcagttacccgtctaagctgaggaaacaccagaaggttcacacaggcataaaaccttttaagtgtagtgactgtggtaaaaccttcaaccgcaaagacgcacttgttctacaccagaggattcacactggagaaaggccttacgagtgcagcaaatgtggtaaaaccttcagtgttctgtctaccctcattcggcaccggaaagtgcacattggagaaaggccctatgagtgtacagaatgtgggaagttctttaaatacaataatagcttcattcttcaccagagagttcacactggagaaaggccttttgaatgcaagcaatgtgggaaaggctacgtgacccgttcaggcctctatcagcactggaaagtccacactggggaacggccctatgaatgtagcctgtgtgggaaaaccttcactaccagatcctaccgcaatcggcaccagcagttccacactgaagagaggtcttatgaatgtacagagtgtgggaaggccttcaaacatagttccaccctccttcagcacaagaaagtccatactccagaaaggcgtcaggaggacagggcacatgggaaggtcgttagctgctagcaccgtgttcatcaggaaaggtcttattccagaaaggaggttaaggagagtggccgtgagagtgccatccgaaagaagctaaaccttgcacatcccaacacccaccccagggagagttcccgtgtgtgcctggtgtgtgggacgctttcgggagccacattgcactctgacttgcctggggctgttggcagtgtcacatcactgagtttatccaccgccatccacctctatccaccccataaggtccctacagcaagtgggacagcagaccttgtgctccttgctctaaacagtagagaatcgttaatagtggagcccaaaacaggcctcattccctacccttgactggtttagctgtggacatgacccacctctggccggaggagctgagctggtatctgctgggggcttcctgggaaggtttaccattttcatggaaatggttgacattacacatggtatttgtcatgccctagcatggactgtctcatactgctctggactatgtggtaataaaggctttattgtttaagccgcttaaaa

SEQ ID NO: 170 - protein, 421 aa, Homo sapiens
MAGEAEAQLDPSLQGLVMFEDVTVYFSREEWGLLNVTQKGLYRDVMLENFALVSSLGLAPSRSPVFTQLEDDEQSWVPSWVDVTPVSRAEARRGFGLDGLCRVEDERAHPEHLKSYRVIQHQDTHSEGKPRRHTEHGAAFPPGSSCGQQQEVHVAEKLFKCSDCGKVFLKAFALLDHLITHSEERPFRCPTGRSAFKKSAHINPRKIHTGETAHVCNECGKAFSYPSKLRKHQKVHTGIKPFKCSDCGKTFNRKDALVLHQRIHTGERPYECSKCGKTFSVLSTLIRHRKVHIGERPYECTECGKFFKYNNSFILHQRVHTGERPFECKQCGKGYVTRSGLYQHWKVHTGERPYECSLCGKTFTTRSYRNRHQQFHTEERSYECTECGKAFKHSSTLLQHKKVHTPERRQEDRAHGKVVSC

SEQ ID NO: 171 - DNA, 4618 bp, Homo sapiens
agtcctgggcgcgcacaaacccggaagcggatcgcgtggagtgaaggtcctaccacggcgcgtgagttttgctctgccttggattaagtctgcacttcccaggtccccggcgcttctgcccctgggacgtgggatccccacggacctggaaattctcgcctgtcttcccttcacccagagcaaattgagacgtcccggaggaagaccaaggcagcctattgggccttccaggcaatcacatgggaatcagccacacgtccttcctcctcacctcagaacatctcagaataacttggtgaaatgtctcccactgtgagcctcagtgagcccacctgtaacatagaggcctcgcccctgagctctacaatcctgtgtccagttgtctcctcagctgtctcctgggtcatcaaacaggcatccccaccttcaggtgtccacgagtggctttctaaacccccaaacacatttccttgcagtctgcacatctcagatgagggtgactacgtacttccggaaacggccgaacttgacagcatgtattttaaatttgtgaaataaattactttatttgtaagtgttgtaatttataatataaagagaaacttagatgtatacgtgaaaagagtgagaagatacatcacttccaatttttgtttgtttgtttgtttttttgagaggaattttcactcttgtggctgaggctggagtgcaatgccatgatatcagctcactgcaacctctgactcctgggatcaagggattctccttcctcagactcccgagtagctgggatcacagtcgactttcaaaattctttaaggattgattcctaaagactcatgttatgtgaagaagcagctcagaagaggaaaggaaaggagccaggcatggctcttcctcagggacgcttgactttcagggatgtggctatagaattctcattggcagagtggaaatgcctgaacccttcgcagagggctttgtacagggaagtgatgttggagaactacaggaacctggaagctgtggatatctcttccaaacgcatgatgaaggaggtcttgtcaacagggcaaggcaatacagaagtgatccacacagggacattgcaaagatatcaaagttatcacattggagatttttgcttccaggaaattgagaaagaaattcatgatattgagtttcagtgtcaagaagatgaaagaaatggccatgaagcacccatgacaaaaataaaaaagttgactggtagcacagaccaacatgatcacaggcatgctggaaacaagcctattaaagatcagcttggatcaagcttttattcacatctgcctgaactccacataattcagatcaaaggtaaaattggtaatcaatttgagaagtctaccagtgatgctccctcggtttcaacatcccaaagaatttctcctaggccccaaatccatatttctaataactatgggaataattccccgaattcttcactactcccacaaaaacaggaagtatacatgagagaaaaatctttccaatgtaatgagagtggcaaagcctttaattgtagctcactcttaaggaaacaccagataccccatttaggagacaaacaatataaatgtgatgtatgtggcaagctctttaatcacaagcaataccttacatgccattgtagatgtcacactggagagaaaccttacaagtgtaatgagtgtggaaagtccttcagtcaggtatcatcccttacatgccatcgtagacttcacactgcagtaaaatctcacaagtgtaatgagtgtggcaagatctttggtcaaaattcagcccttgtaattcataaggcaattcatactggagaaaaaccttacaagtgtaatgaatgtgacaaagcttttaatcagcaatcaaaccttgcacgtcatcgtagaattcatactggagagaaaccttacaaatgtgaagaatgtgacaaagttttcagtcggaaatcaacccttgagtcacataagagaattcatactggagagaaaccatacaaatgtaaggtttgtgacacagctttcacatggaattctcagctggcaagacataaaagaattcacactggagagaaaacttacaagtgtaatgagtgtggcaagaccttcagtcacaagtcatcccttgtatgccatcatagacttcatggtggagagaaatcttacaaatgtaaggtctgtgacaaggcttttgcgtggaattcacacctggtaagacatactagaattcatagtggaggaaaaccttacaagtgtaatgaatgtgggaagacctttggtcaaaattcagatcttctaattcataagtcaattcatactggagagcaaccttacaaatatgaagaatgtgaaaaggttttcagttgtggatcaacccttgagacacataagataattcacaccggagagaaaccatacaaatgtaaggtttgtgacaaggcttttgcgtgtcattcctatctggcaaaacatactagaattcatagtggagagaaaccttacaagtgtaatgagtgcagcaagaccttccgtctgaggtcataccttgcaagccatcgcagagttcatagtggtgagaaaccttacaagtgtaatgagtgcagcaagaccttcagtcagaggtcataccttcattgccatcgtagacttcatagtggtgagaaaccttacaagtgtaatgagtgtggcaagaccttcagtcacaagccatcccttgttcaccatcgtagacttcatactggagagaaatcttacaaatgtacggtttgtgacaaggctttcgtgcgtaattcatacctggcaagacataccagaattcacactgcagagaaaccttacaagtgtaatgaatgtgggaaggcttttaatcaacaatcacaactttcacttcatcatagaattcatgctggggagaaactttacaaatgtgaaacatgtgacaaagttttcagtcgcaaatcacaccttaaaagacataggagaattcatcctggaaagaaaccatacaaatgtaaggtttgtgacaagacttttgggagtgattcacacctgaaacaacatactggacttcacactggagagaaaccttacaagtgtaatgagtgtggcaaagcctttagcaagcagtcaacacttattcaccatcaggcagttcatggtgtagggaaacttgactaatgtaatgattgtcacaaagtcttcagtaacgctacaaccattgcaaatcattggagaatctataatgaataaagatctaacaagtgtaataaatgtggcaaatttttcagacatcattcatacattgcagttcattgacacactcatactggagagaaaccttacaaatgtcatgactgtggcaaggtcttcagtcaagcttcatcctatgcaaaacataggagaattcatacaggagagaaacctcacatgtgtgatgattgtggcaaagcctttacttcatgttcacacctcattagacatcagagaatccctactggacagaaatcttacaaatgtcagaagtgtggcaaggtcttgagtccgaggtcactccttgcagaacatcagaaaattcatttttgagataactgttcccaatgcagtgagtatagcaaaccatcaagcattaattgacactagagtcagtccagcattgacttgagtttgtgttgacttaacattgagttcaacccttaattgacattcaagtgtttatgttaagaggattgggccaggtgtggtttctcacacctgtaattccagcacggttggaggccaaggcacataggtcacttgaggtcagaagtttgaaaccagcatggccaacagatgtcagccacttttcccagcctgttttttgattcttattttctatttttcttttttgagatagtactttttaaagagatagtacttttttgatatagtactttataaaagggagatcaggccaggcacggaggctcatgtaagtaatcccagcactttgggaggccgagacgggcccatgacaaggtcaggagatcgagaccgtcctggctaacacggtgaaaccccatctctactaaaaatataaaatattagccaggcgtggtggcaggtgcctgtagtcctagctgcttgggaggctgaggcaggagaatggtgtgaatcctggagacggagcttgcagggagccaacatcgtgccactgcactccggcctgggcgacagtgagaatctgtctcaaaaaaaaaaaaaaaaaaaggatatcaaagctggatggtggctcatccctgcaatcacaacactttggtagactgatgtgagtggatcacctaaggtcagaagttcaagagcaccctggctaacatggtgaaaccccatctctactaaaaatacaaaagttagccggggggtggtggtgtgcacctttagttccagctacttgagaggctgaggcacaagagtcgcttaaacctgggaggtagaggttgccgtgaggcaaaatcgtgccactgccctcagcctgggcagtagagtcagtctccatctcaaagaaaccagcaaacaaaaaatattaaaaaaaaacattaaaaatg

SEQ ID NO: 172 - protein, 791 aa, Homo sapiens
MLCEEAAQKRKGKEPGMALPQGRLTFRDVAIEFSLAEWKCLNPSQRALYREVMLENYRNLEAVDISSKRMMKEVLSTGQGNTEVIHTGTLQRYQSYHIGDFCFQEIEKEIHDIEFQCQEDERNGHEAPMTKIKKLTGSTDQHDHRHAGNKPIKDQLGSSFYSHLPELHIIQIKGKIGNQFEKSTSDAPSVSTSQRISPRPQIHISNNYGNNSPNSSLLPQKQEVYMREKSFQCNESGKAFNCSSLLRKHQIPHLGDKQYKCDVCGKLFNHKQYLTCHCRCHTGEKPYKCNECGKSFSQVSSLTCHRRLHTAVKSHKCNECGKIFGQNSALVIHKAIHTGEKPYKCNECDKAFNQQSNLARHRRIHTGEKPYKCEECDKVFSRKSTLESHKRIHTGEKPYKCKVCDTAFTWNSQLARHKRIHTGEKTYKCNECGKTFSHKSSLVCHHRLHGGEKSYKCKVCDKAFAWNSHLVRHTRIHSGGKPYKCNECGKTFGQNSDLLIHKSIHTGEQPYKYEECEKVFSCGSTLETHKIIHTGEKPYKCKVCDKAFACHSYLAKHTRIHSGEKPYKCNECSKTFRLRSYLASHRRVHSGEKPYKCNECSKTFSQRSYLHCHRRLHSGEKPYKCNECGKTFSHKPSLVHHRRLHTGEKSYKCTVCDKAFVRNSYLARHTRIHTAEKPYKCNECGKAFNQQSQLSLHHRIHAGEKLYKCETCDKVFSRKSHLKRHRRIHPGKKPYKCKVCDKTFGSDSHLKQHTGLHTGEKPYKCNECGKAFSKQSTLIHHQAVHGVGKLD

SEQ ID NO: 173 - DNA, 4628 bp, Homo sapiens
ggtcctcgcctcgcttcacggtctttaccgctcagcttcccggagtccgcgcaggagcgcgtctgaataggaagcgttttcggacgtggatgcggcgttttgtcgctgccagtggtgtctggagaggttcgggctcggtcctcaggtcctggctcccagaagcaaaataactcaagtgaagcaatgaaggaagaagaaggaggttgctggccttggatatcataatttctggggacaactttaagtggacactaatatttctgactaggaaaacttcaaaaacttcatggcaaatgcagaagagacaaagacgtatagtccatgttatccactattttctgagcacagaagaaaatgatcaagacccaggaatcactgaccctggaggatgtggctgtggaattcagctgggaggagtggcagctcctggacactgctcagaagaacctgtaccgggatgtgatggtggagaactataaccacctagtatcactggggtatcaaactagcaaaccagatgtactctccaagttggcacatggacaagaaccatggacaacagatgctaaaattcagaataaaaattgtccaggaatcgggaaagttgacagtcatctgcaagagcactctccaaaccaaagacttctgaagagcgtgcagcaatgcaatggacagaatacacttagaaatattgtacatctcagcaagacacattttcctatagtgcaaaatcatgatacatttgacttgtacagaaaaaatttgaaatcaagtttaagtttaatcaaccagaagagaagacatggaataaataaccctgttgagtttattggaggtgagaaaacacttctacatggtaagcatgaacgtacgcatactaaaactagattttctgaaaatgcaaaatgtatccatactaaattccaagtcttcaagcatcagaggactcagaaaattgagaaaccccatgcatgcattgaatgtgagcaaaccttccttaggaagtctcagctcatttaccatgagaacatttgtatacaagagaatcctggaagtggtcaatgtgagaaattatccagaagtgtcctgttcactaagcatctgaaaactaatacaacagacaaaatctgtatacccaatgaatatagaaaaggctctactgtgaagagtagtctcattacacatcaacaaacccatacagaagagaaatcctatatgtgcagtgagtgtggaaagggctttacaatgaagcgctatctaattgctcatcagcgaactcatagtggagagaaaccttatgtgtgcaaagaatgtggaaaaggtttcactgtgaagagcaatctcattgtacatcagcgaactcatacaggggagaaaccctatatatgcagtgaatgtggaaaaggcttcaccatgaagcgctatcttgttgtacatcagcgaactcatactggagagaaaccctatatgtgcagtgaatgtggaaaaggctttaccgtgaagagcaatctcattgtacatcagcgctcccacacaggagaaaaatcttacatatgcagcgaatgtggaaaaggcttcactgtcaaacgcactctcgttatacatcagcgaactcatacaggagagaaatcttacatatgcaatgaatgtggtaaaggcttcaccacaaagcgcactcttattatacatcagcgaactcatacaggagaaaaaccctatgaatgcaatgaatgtggtaaagccttcagccagaaaatatgcctcatacaacatgagagatgtcatacaggaaagactccctttgtatgtaccgagtgcggaaaatcctattcacacaaatatggcctcattacccatcagagaattcacacaggagagaaaccttatgagtgcaatgaatgtggaaaagccttcaccacaaagtcagtactcaatgtacatcaaagaacgcatacaggagagaggccgtatggatgcagtgattgtgagaaagccttctcccacttatcaaaccttgtcaaacataagaaaatgcacacaagagaaatgggtagaatcagtcaagttgaaaactcctgtaatggagagtcacagctccttccttataagtgaactcatgcagaagaaaaccctactagtgccgtgactatggaaatgccttttgtggcaactcagacttcattaaacatcagtgtgtttctagccaattggaacataaacatggtgctgcctgttgacagatgtgtgtctgtcctcaggaggtgaaataatttgccctagagatcaatttgatgaatacagtaaataaggtagtgcctttagtggtcttttacctcatattttctgtcaatgaaaatacgttgaataaactatattaatgtggagatgttttgagcaataatttctgctcatatgtctgaaaagtatacagagataaattctgtgaatacaaagactaagaaaagtcttctgtggaaagatagactttattatcaggtttcatcatagatttcaacgtaagtgagcttattgttgatagaaacatgatgaccatgacaaagtctttactcagaaatatgacctcagtgagtgtcaaagtttacactggaaaataactttaaggtgacagtattgatggcaggatttcagcgacgcactctgcttcatcatttgtcaggagatcacatagaaagtaaaattgttccgaacatgctatcaaataaatgtggaacacctttagcaaactatcaacagctcatgaaggcatgaaatgtggtgaaaatgatgaatatttgagtgctttttcttaataagtataaccttaaacatcagctaatacacctggtgtgcattttcagtcaggataccttaatcctcatttctagttgccttgccaatgattccataatatactgtctcattactgtttatttttactgttgtgtaaaattgtggtataatgagaaatacatttggtctttgttcctggttcctggcatagagctcctaaaacgcttagaatttcatgagtgataagagttttttggttttgttttgtttttgctgttgttgttattcatagcactgcccttttaattacacctgattatactactgaagtgacttatggttgctcccctagacagcctcagaatggggctgttctctaggaagatcaagtaactagaggatggagactttgtgccccatttctcccacctcctggaaggggaggggtgctggagattagattagacaatgagattaagagaactccaaatagcccaagagggtggtgcacccccaacttcataggggtagaggctcctgagattaggagaaccctttttaggctttactctatgtacctcttcatttgagtgttcatttgcgtcctttataaccagtaaaacaaagtacgctgttttcttgagttttgtgagccctgtagcaaattatcaaacctgagtagggcagtgggaactcggaatttatcaccattcagaactgcaggttgtccttgtgagtggcatctgatgtgggggaagtcttggactgagccccttaacttgtggagtctgcactaatttagactgcactaactaacttgcactgcactaacttggactgcactaacttgtggagtctgcactaacttggagaagttagtgtcagaattgaattatagaacacccagttgttcagaattgaattgtagaacacccaattggtgtgggagaattagagaatttatttgtgtcagaaaatactccagaacaaccaccccatattatgattagctcttttcctttctttggctctgagcttaattgtacattaagcaaacttaagtagaaaagaaactgaatatgttaaatatattaacaacatatttggacttgcttaactaagattatagagatgatcagtttataaaaccaccttcaacttaaataaatttgaactcgaaattgcaaaagcagtctagaggctttgctagtatccttcaaccaatttctagtaaaaatatcctatataaccataattatcaaaaccagaaaaacaacattggtaggatactataaagtactaatcttattttggatttgacgaatttttacatgtttttttcttttttagtttgtactctaagaagttgtattacatgtacagattcgtgtaaccactgcaaccacataaaactaatgaacacaaagtccctcatgctacctttttatgcttacactccatccaaacctaactctgccaaccacttttctcctatcagtataatttcatcatttcatgaatatgataaaaataaaattgtttttgtaaatggtttttataaattttatataaataagttatatgaatttttattgatagagagtatgtaagcttttggcatttttgtcactcagcaaattactcctaaggtttatatgagttgatgaatagttgttttattatttttttttaccaccatgtatctaaccagatgaaagttgtttatatttgagagtagtatacatatttgatgtagtagtttatccattcacctatgagatatatttgcactgttttcctggttttaagtgctataaataaagatgctgtgaaatcta

SEQ ID NO: 174 - protein, 585 aa, Homo sapiens
MIKTQESLTLEDVAVEFSWEEWQLLDTAQKNLYRDVMVENYNHLVSLGYQTSKPDVLSKLAHGQEPWTTDAKIQNKNCPGIGKVDSHLQEHSPNQRLLKSVQQCNGQNTLRNIVHLSKTHFPIVQNHDTFDLYRKNLKSSLSLINQKRRHGINNPVEFIGGEKTLLHGKHERTHTKTRFSENAKCIHTKFQVFKHQRTQKIEKPHACIECEQTFLRKSQLIYHENICIQENPGSGQCEKLSRSVLFTKHLKTNTTDKICIPNEYRKGSTVKSSLITHQQTHTEEKSYMCSECGKGFTMKRYLIAHQRTHSGEKPYVCKECGKGFTVKSNLIVHQRTHTGEKPYICSECGKGFTMKRYLVVHQRTHTGEKPYMCSECGKGFTVKSNLIVHQRSHTGEKSYICSECGKGFTVKRTLVIHQRTHTGEKSYICNECGKGFTTKRTLIIHQRTHTGEKPYECNECGKAFSQKICLIQHERCHTGKTPFVCTECGKSYSHKYGLITHQRIHTGEKPYECNECGKAFTTKSVLNVHQRTHTGERPYGCSDCEKAFSHLSNLVKHKKMHTREMGRISQVENSCNGESQLLPYK

SEQ ID NO: 175 - DNA, 4075 bp, Homo sapiens
gaccctggatagtcgccgtcaggcactgaggaggccgagagatgaggccggagcccaccaagttctgggaagttctttctgacacaagtaagataacatctctgccatgcccacaggtgctgagaacaagagaaatcaagtgaaggaaggaggcggagtttccaagacttgggtgtcatcatttctggggacatccttgattggagattgaagtttttgaaccgaaatttagagctgattcagaagagacaaatacagaacgtccaagttagcagtcatttcccaaatttaggagacaatgatgcaggcccaggaatccctaacactggaggatgtggctgtggacttcacctgggaggagtggcagttcctgagccctgctcagaaggacctgtaccgggacgtgatgttggagaactacagcaacctggtggcagtggggtatcaagccagcaaaccagatgcactctccaaattggaacgaggagaagaaacttgcacaacagaagatgaaatctactctcgaatctgttctgattcaggaggtgcatcaggaggtgcatatgcagaaatcaggaaaattgatgatcctctgcagcatcacttgcaaaatcaaagtattcagaagagtgtgaaacagtgccatgaacagaatatgtttggaaatattgttaatcagaacaaaggtcatttcctgctgaagcaagattgtgatacgtttgacttacatgaaaaacctttaaaatcaaatttaagttttgaaaaccagaaaaggagctctggcctaaagaactctgctgagtttaatagagatgggaaatccctttttcatgctaaccataaacaattttatactgaaatgaagtttcctgcaattgcaaaacctattaataagtcccagttcattaagcaacagagaactcacaacatagagaatgcccatgtatgcagtgaatgtgggaaagccttcctcaagttgtctcagtttattgatcatcagagagttcacactggagaaaaacctcatgtatgcagtatgtgtgggaaagctttctccagaaaatccagactaatggaccatcagagaactcatacagaactgaaacattatgaatgcactgaatgtgacaaaaccttcctcaagaaatcacagctcaatatacatcagaaaactcatatgggagggaaaccttacacatgtagccaatgtgggaaagccttcatcaagaagtgtcggctcatttatcatcaacgaactcatacaggagagaaaccccatggatgcagtgtatgtgggaaggccttctctacaaagttcagtctcactacacatcagaaaactcatacaggagaaaaaccttatatatgtagtgaatgtggaaaaggcttcattgagaagaggcgtcttactgcacatcatcgaactcatactggtgagaaaccctttatatgcaataaatgtgggaaaggcttcaccttgaagaacagtcttatcacacatcagcaaactcatacaggagagaaattatatacatgtagtgaatgtggaaaaggcttttcaatgaagcactgtctcatggtacatcaacgaactcatactggagagaaaccttataaatgcaatgagtgtggaaagggcttcgctttgaagagcccactcatcagacatcagcgaacacatactggagagaaaccctatgtatgcaccgaatgtcgaaaaggtttcaccatgaagagtgacctcattgtacatcagcgaactcatactgcagagaagccatatatatgcaatgattgtggaaaaggcttcactgtgaagagccgccttattgtgcatcagcgaactcatactggagaaaaaccctatgtatgtggtgagtgtggaaaaggctttccagcaaagatccggctaatgggacatcaacgaactcatacaggagagaaaccttatatttgcaatgagtgtggaaaaggcttcactgagaagagtcatctcaatgtacatcggcgcactcatacaggagagaaaccctatgtatgcagtgaatgtggcaaaggcttaactgggaaaagcatgctcattgcacatcagcgaactcatactggggagaaaccttatatatgcaatgaatgtggaaagggcttcaccatgaagagtactctcagtatacatcagcaaactcatactggagagaagccatacaaatgcaatgaatgtgataaaaccttcaggaagaagacatgcctcatacaacatcagcgatttcacacaggaaagacttcctttgcatgtactgaatgtggaaaattctctttgcgcaaaaatgatcttattacacatcagagaattcacacaggagagaaaccgtacaaatgcagtgactgcgggaaagccttcactacaaaatcagggctcaatgttcatcaaagaaaacatacaggagagaggccctatggatgtagtgattgtgggaaagcttttgcgcacttgtctatccttgttaaacacaggagaattcacaggtagtcattttgggaaagcctcttgccagatgtaggcccttaagatatctgcaaagaagagtaatttcatgaatgcagactacatggttgtttatttagtgatcagttacttcatgttttgtgtcagagaaaacatgtacaaaacatttgagaaaatattttaggacattatgtctaaaaattgtatactgagaaaaatcctatgaatgtggcagactataaaagcctttggtgggaagataaaccccctcagaagtgatcatagatcatgaataaactactaattcgtggaaatgtaataattataggaacgtctttgcccaaaaataaaacttcaacagattgagagagttcacactggagaaatactttcctctggcaaacccctgtggcagggttttcagtaaaatgttttgcctcatcgtgtgctaggaaataatgcagaaaaaacttatgaaaacattcaatgtagaagacttttaggaaaatatcagagaatttaatgaaggaaagaagccttggcaaaatgatggatgagagctttctgtcacaattctaaccttaacagataatatgcctcatgtgcatttgggaacaggatagcttgagccatattcctagttgccttgtcactgattttatacattttaaattgtgacttcctctaatcacgaactaaaatttaatattgtatataataccggagtattttatgcctgcctcattttattatatgattagctcctgcatttctttggttctaagtttgtgttatttcagaataactaaagtacttcagaatgaaactggatacagtatattcagttcataagtgtaattgaccatacttgaatatgtttaagtttataagtaacatcaggtgttatgaaattaatataaataagatgtttttgtaagtttttattttgaaataagtttagattcacaaaatcttaccaaaatattccagagttcttgcccttaacccagcttcttccaaagataacaacttacataagcatagttcattaccaaatacaggaaagtgaaattgttacaatactgttaactacagaatttatttggaaatcaccagttttaacatgcatgcatttttgtttgttttttatatgtagctttaagaaatcttaacacatatattgattcatgtcaccaccaccgtaatcgagattcagaatgttgcatcaatgcaaactccctcatgctccttgtttatagtcacaacctctcctcagccctaacccttggcaatcagaaatcttttcatctttagttttgtcattagtagcatgttataaaaatggaatcatacagcatgtacccttttggtattggctatttcaactaaagcagattaacctgaaatccatccaagttgttctgcatatcattgttctgtttttattggccactaataatctatgatacgaatataccactatttgtttattcacccactgaaggacattagttttgttcccggtttttcttactgttacaaataaaaatcctatgaacatttgtacacaca

SEQ ID NO: 176 - protein, 742 aa, Homo sapiens
MMQAQESLTLEDVAVDFTWEEWQFLSPAQKDLYRDVMLENYSNLVAVGYQASKPDALSKLERGEETCTTEDEIYSRICSDSGGASGGAYAEIRKIDDPLQHHLQNQSIQKSVKQCHEQNMFGNIVNQNKGHFLLKQDCDTFDLHEKPLKSNLSFENQKRSSGLKNSAEFNRDGKSLFHANHKQFYTEMKFPAIAKPINKSQFIKQQRTHNIENAHVCSECGKAFLKLSQFIDHQRVHTGEKPHVCSMCGKAFSRKSRLMDHQRTHTELKHYECTECDKTFLKKSQLNIHQKTHMGGKPYTCSQCGKAFIKKCRLIYHQRTHTGEKPHGCSVCGKAFSTKFSLTTHQKTHTGEKPYICSECGKGFIEKRRLTAHHRTHTGEKPFICNKCGKGFTLKNSLITHQQTHTGEKLYTCSECGKGFSMKHCLMVHQRTHTGEKPYKCNECGKGFALKSPLIRHQRTHTGEKPYVCTECRKGFTMKSDLIVHQRTHTAEKPYICNDCGKGFTVKSRLIVHQRTHTGEKPYVCGECGKGFPAKIRLMGHQRTHTGEKPYICNECGKGFTEKSHLNVHRRTHTGEKPYVCSECGKGLTGKSMLIAHQRTHTGEKPYICNECGKGFTMKSTLSIHQQTHTGEKPYKCNECDKTFRKKTCLIQHQRFHTGKTSFACTECGKFSLRKNDLITHQRIHTGEKPYKCSDCGKAFTTKSGLNVHQRKHTGERPYGCSDCGKAFAHLSILVKHRRIHR

SEQ ID NO: 177 - DNA, 1567 bp, Homo sapiens
ggtacttgatccaggtatatgtcacattcccaactgttggctgggcccaagcaaattagtaaaataaattaggtgctgtgtgaaagtatacgccacaatcacacctgcgggaaggaccaggaataaatttcacaattctacgtatttcccagctttaggtctgagagtctacacttctgagctccagttcttctcttcactgctctgcgtcctctgttcctagaggccaagccactgtggccttgtgttctgcaggtatccgcagatttatggctaaaagaccgggatcccctggaagccgagaaatgggactgttgacattcagagatgtagtcatagaattctctctggaggagtggcaatgcctggatcacgctcagcagaatttatatagagatgtgatgttagagaactacagaaacctggtctccctgggtattgctgtctctaagccagacttgatcacctgtctggagcaaaataaagagccttggaatataaagagaaatgagatggtaaccaaacacccagttatgtgttctcatttcacccaagaccttccgccagagctaggcataaaagattcactccaaaaagtaataccaagaagatatggaaaaagtggacatgacaatttacaagtaaaaacatgtaaaagcatgggtgagtgtgaggtgcaaaaaggaggttgtaatgaagttaaccaatgtttgtcaactacccaaaacaaaatatttcagactcataaatgtgtcaaagtcttcggcaaattttcaaattccaatagacataagacaagacatactggaaagaaacatttcaaatgtaaaaaatatggcaaatcattttgcatggtttcacaactacatcaacatcagataattcatactagggagaattcctaccaatgtgaagaatgcggcaaacccttcaactgctcttcaaccctttctaaacataaaagaattcatactggagagaaaccctacagatgtgaggaatgtggcaaagcttttacctggtcctcaacccttactaaacataggagaattcatactggagaaaaaccctacacatgtgaagaatgtggccaagcctttagccgctcctcaacacttgctaaccacaagagaattcatactggagagaaaccatacacatgtgaagaatgtggcaaagcctttagcttatcctcatccctcacttaccacaagagaattcatactggagagaaaccctacacatgtgaagaatgtggcaaagcctttaactgctcctcaacccttaagaaacataagataattcatactggagagaaaccctacaaatgtaaagaatgtgggaaagcctttgccttctcctcaactcttaatactcataagaggattcatactggagaggaaccctacaaatgtgaagaatgtgacaaagcttttaagtggtcctcaagtcttgctaatcataagagtatgcatactggagagaaaccctacaaatgtgaataatgtgataaagtccagccttcagaccttataatacataaaataatttatacttgaaaaaatca

SEQ ID NO: 178 - protein, 411 aa, Homo sapiens
MAKRPGSPGSREMGLLTFRDVVIEFSLEEWQCLDHAQQNLYRDVMLENYRNLVSLGIAVSKPDLITCLEQNKEPWNIKRNEMVTKHPVMCSHFTQDLPPELGIKDSLQKVIPRRYGKSGHDNLQVKTCKSMGECEVQKGGCNEVNQCLSTTQNKIFQTHKCVKVFGKFSNSNRHKTRHTGKKHFKCKKYGKSFCMVSQLHQHQIIHTRENSYQCEECGKPFNCSSTLSKHKRIHTGEKPYRCEECGKAFTWSSTLTKHRRIHTGEKPYTCEECGQAFSRSSTLANHKRIHTGEKPYTCEECGKAFSLSSSLTYHKRIHTGEKPYTCEECGKAFNCSSTLKKHKIIHTGEKPYKCKECGKAFAFSSTLNTHKRIHTGEEPYKCEECDKAFKWSSSLANHKSMHTGEKPYKCE

SEQ ID NO: 179 - DNA, 3341 bp, Homo sapiens
ctttgtctccttgcggccggcggggtgctgggttcccgtctgctgcctctcggagagtcccgggtgactgccgcaggctccatcgccctgtggcctgcaggtattgcgagatttatagggaggacgctgggacccccaaaagctgggaaatgggactattggcattcagggatgtggctctagaattctctccagaggagtgggaatgcctggacccagctcagcggagtttgtatagggatgtgatgttagagaactacagaaacctgatctcccttggtgaggatagcttcaatatgcaattcctatttcacagtcttgctatgtctaagccagaactgatcatctgtctggaggcaaggaaagagccctggaacgtgaacacagagaagacagccagacactcagttttgtcttcttatcttactgaagacattttgccagagcagggcctgcaagtttcattccaaaaagtgatgctgagaagatatgaaagatgttgtcttgagaaattacgcttaaggaatgactgggaaattgtgggtgagtggaaagggcagaaggcaagttataatggacttgacctatgctcagcaactactcatagcaaaaactttcaatgcaataaatgtgtgaaaggttttagtaaatttgcaaatctaaataaatgtaagataagccatactggagaaaaaccattcaaatgcaaagaatgtggcaatgtctcttgcatgtctttaataatgactcaacagcagagaatccatattggagagaacccgtaccaatgtaaaaaatgtggcaaagcctttaatgagtgctcatgctttactgactgtaagagaattcatgttggagagaaacattgcaaatgtgaagaatgtaataacatttttaagtcttgctcaagtcttgctgttgttgagaaaaatcatactgaaaagaaaacctacagatgtgaagaatgtggcaaagcttttaacctgtgctcagttcttactaaacataagaaaattcatactggagagaaaccatacaaatgtgaagaatgtggcaaatcctttaagttgttcccataccttactcaacacaagagaattcatagtagagagaaaccctacaagtgtgaagaatgtggcaaagtctttaaattgttgtcataccttactcaacatagaagaattcatactggagagaaaaccttccgatgtgaagaatgtggaaaagcctttaaccagagctcacatctgactgaacataggagaattcatactggtgagaaaccatacaaatgtgaggaatgtggcaaagcttttacctggttctcataccttattcagcataagagaattcatactgggcagaaaccctacaaatgtgaggaatgtggcaaagcttttacctggttttcataccttactcaacataagagaattcatactggagagaaaccctacaaatgtgatgaatgtggcaaagcttttaactggttttcatatcttactaatcataagagaattcatactggagagaaaccctacaaatgtgaagaatgtggcaaagcctttggccagagctcacacctttctaaacataagacaattcataccagagagaaaccatacaagtgtgaggaatgtggcaaagcctttaaccactctgcacaacttgctgtacatgagaaaactcatacctgagaaaaaccctacaattctaaacaatatggcatagtctttaatacctattcacaacttcacagcagaatatttttactgaataagagtgttacaaatgtaatgactgtcaaaaggccatttacagtctatgagcctttgagtgcactaaaatgtttaggctacgaacaatacaaatagaccggttcaacacctccacttatatcacagctcttactgtacacagaagaatttatactggagggaaaccctccagttgctcaaactgtattcaatttcaaagactttgtattggagagaaaccctacaaatgtaataaatgcagaaacaacatttgttcaaaaaatatacctcagaaaacaccagagtgttcacactaaaaactgttttacagatgcagtaaatgtgaaaaaatgtctaatcaaaaattacatcaaaacacatccaagaattcatagtaaaaagcactaagtcactgacactttcagacattactgtaaatctgagtgttggttatagagaataattcaaagttaagttaaagtaagtaggagattcaccttttggggaagttataattacatttcaagtataccttttggtgccaggcacggtggctctttcctatagttgctgcacttttggatgccgaggtcgggggattgcttgagcccaggagtttgggaccaggctgggcaacatggcaaaacctcatctctacaaaaagtaaaataaaagccaggcttggtggcacatgcctgttgtcccagctacttggaaggctcaggtgggaggattgcttgagcctggaggttgaggatgcagtgagctgctatctggcaacttcactcctgcctgggcaacagagcaagaccctttctcaataataataataacaacataataataaagtatactcggtgcactgaaagagttttagcttttttgaaaatcacatatttatgtaattcaagtcttaaatcacttgataccatgccttcatttctagtgtttatgtgaaggcatgaggcctactgttgctacatgaaagctgtgagagtttcttctatattcgggtgggtgttgttcatatccttttctttggaagattatggacattgcattgtaagcttcctgaagaaatttaactggagaggctctttgtacttgtcttataatagggttgtaagtgattcatgagataggtcttcagagtactattctgcattatatttaagaaagaaacatttgagttttacaagtcagttgtttttcctattgcacattaaggtaataaaattcagtggattttgaaatgctctttttagactgtttgaacttaatttgttttaataagacattgttttaatgtctttggaccgttgtacattaagtgatgcgtatcctaccaccaacgttaacctatctcaccttagttacggttgtaggtaacaaatggtaacaatacaatagtgggtaacatggtggaatagtatctctaatgatcccttctcccagtggcattaaacttcaaataatttgaaaaatattgttcccacacgttacaccttcattctgtttgctctttttgtaatgacagtgtcattattaaggctataataaagcctatataggattataatcaaa

SEQ ID NO: 180 - protein, 515 aa, Homo sapiens
MGLLAFRDVALEFSPEEWECLDPAQRSLYRDVMLENYRNLISLGEDSFNMQFLFHSLAMSKPELIICLEARKEPWNVNTEKTARHSVLSSYLTEDILPEQGLQVSFQKVMLRRYERCCLEKLRLRNDWEIVGEWKGQKASYNGLDLCSATTHSKNFQCNKCVKGFSKFANLNKCKISHTGEKPFKCKECGNVSCMSLIMTQQQRIHIGENPYQCKKCGKAFNECSCFTDCKRIHVGEKHCKCEECNNIFKSCSSLAVVEKNHTEKKTYRCEECGKAFNLCSVLTKHKKIHTGEKPYKCEECGKSFKLFPYLTQHKRIHSREKPYKCEECGKVFKLLSYLTQHRRIHTGEKTFRCEECGKAFNQSSHLTEHRRIHTGEKPYKCEECGKAFTWFSYLIQHKRIHTGQKPYKCEECGKAFTWFSYLTQHKRIHTGEKPYKCDECGKAFNWFSYLTNHKRIHTGEKPYKCEECGKAFGQSSHLSKHKTIHTREKPYKCEECGKAFNHSAQLAVHEKTHT

SEQ ID NO: 181 - DNA, 2760 bp, Homo sapiens
gtttccggcggcgtcgcgcgtttgcgagcctcgggtggtcctcagggagggtctctcggccagaacacgtggatgcccacccaccactgagcctcatggaggtggtaacatttggcgatgtggctgtgcacttctctcgggaggagtggcagtgtctggaccctggccagagggccctctacagggaagtgatgctggagaaccacagcagtgtggctggactagcaggattcctggttttcaagcctgagctgatctctcggctggagcagggagaagagccatgggtcctcgacctgcagggagcagaggggacagaggcaccaaggacctccaagacagattctacgattaggactgaaaatgagcaggcctgtgaggacatggacatcctaaaatcagaatcctatgggacagtggtcagaatctccccacaggactttcctcagaatcctggctttggagacgtttctgattctgaggtctggttagacagtcatctgggcagtcccgggctgaaagtgacaggctttaccttccaaaataactgtttgaatgaggagactgtggttcccaagaccttcaccaaggacgcaccccagggatgtaaggagctgggaagcagcggcctggattgtcagcctcttgaaagtcagggagagagtgcggaagggatgtcccagagatgcgaggagtgtggcaaaggcatcagagccacttcagatatcgctctgcattgggaaattaatacacagaaaattagcagatgtcaagaatgccaaaaaaagttatctgactgcttgcaggggaaacatacaaataactgccatggagagaagccgtacgaatgtgcagagtgtgggaaagtcttcaggctctgctcgcagcttaatcagcatcagagaatccacacgggagagaaaccctttaaatgcactgagtgtggaaaagccttccgcctgagctcaaaacttattcagcatcaaagaatccacactggggagaagccctacagatgtgaggaatgtggaaaagcttttggtcagagctcaagcctcatccaccatcagagaatccacacaggagagaggccctatggttgtcgtgagtgtgggaaagccttcagccagcagtcgcagctggttagacaccagagaactcacactggggagaggccctacccttgcaaggagtgtgggaaggccttcagccagagctccaccctagcccagcatcaaaggatgcatactggggagaaagctcaaattctaaaagcctcagacagtccaagccttgttgcacatcagagaattcacgctgtagagaaaccatttaagtgtgatgagtgtgggaaagcttttaggtggatctctcgcctgagtcagcatcagctgattcacactggagagaagccttataaatgcaacaagtgtacaaaagcctttggttgtagttcacggcttattcgccatcagagaactcacactggagaaaaaccatttaaatgtgatgagtgtggcaaaggctttgttcagggctcacaccttattcagcatcagcgaatccacactggagagaaaccctatgtgtgtaatgactgtggaaaagccttcagtcagagttccagccttatttaccatcagagaatccataaaggagagaagccctacgaatgcctccaatgcggaaaagccttcagtatgagcacacagcttacaatacatcaaagggttcacactggagagaggccctataaatgtaatgaatgtgggaaagccttcagtcaaaactcaacccttttccaacaccagataattcatgcaggggtgaagccctatgagtgcagtgagtgtggaaaagccttcagccggagctcatatcttattgaacaccagagaatacacactagggcccagtggttttacgaatatgggaatgccctggaagggtccacctttgtgagccgtaaaaaggttaatactataaagaaactgcatcagtgtgaagactgtgagaagatatttaggtggcgttcacacctaattatacaccagagaattcacaccggggagaagccttataaatgcaatgactgtggcaaagcttttaatcgtagctcaaggcttacccagcatcaaaaaattcacatgggatagaccacttacatataaatgtgtatatatgtgaataaacctatagccttaacttacttattttatatggaatcgtttatactgacaaacatgtagaatgttggtaaaggttcagaattgctctcaagaatatccaacttcaggccgagtgtggtggcttatgcctgtcatcccagcactttgggaggccaaggcgggcacatcacgaggtcaggaggttgagaccatcctgggtaacaggtgaaaccccatctctactaaaaatacaaaaatttagctgggcgtggtggcaggcacctgtggtcccagctgctcgggaggctgaggcaggagaatggcatcagcccaggaggcggagcttgcagtgagctgagatcgcgccactgcactccagcctgggtgacagagtgagactccctctcaaaaaaaaaaaaaaaaaaaaaaatccaacttcatacaaaatgtatgtttatttcctgaaatgtttgaccttaacctgttcaataaagcctgtgtccctcaaaatcagggtgcagtctgcagttttgagttgacaggtccctgtgaatgaggaagcagcacaaggagggctctacgagcgctgcta

SEQ ID NO: 182 - protein, 686 aa, Homo sapiens
MEVVTFGDVAVHFSREEWQCLDPGQRALYREVMLENHSSVAGLAGFLVFKPELISRLEQGEEPWVLDLQGAEGTEAPRTSKTDSTIRTENEQACEDMDILKSESYGTVVRISPQDFPQNPGFGDVSDSEVWLDSHLGSPGLKVTGFTFQNNCLNEETVVPKTFTKDAPQGCKELGSSGLDCQPLESQGESAEGMSQRCEECGKGIRATSDIALHWEINTQKISRCQECQKKLSDCLQGKHTNNCHGEKPYECAECGKVFRLCSQLNQHQRIHTGEKPFKCTECGKAFRLSSKLIQHQRIHTGEKPYRCEECGKAFGQSSSLIHHQRIHTGERPYGCRECGKAFSQQSQLVRHQRTHTGERPYPCKECGKAFSQSSTLAQHQRMHTGEKAQILKASDSPSLVAHQRIHAVEKPFKCDECGKAFRWISRLSQHQLIHTGEKPYKCNKCTKAFGCSSRLIRHQRTHTGEKPFKCDECGKGFVQGSHLIQHQRIHTGEKPYVCNDCGKAFSQSSSLIYHQRIHKGEKPYECLQCGKAFSMSTQLTIHQRVHTGERPYKCNECGKAFSQNSTLFQHQIIHAGVKPYECSECGKAFSRSSYLIEHQRIHTRAQWFYEYGNALEGSTFVSRKKVNTIKKLHQCEDCEKIFRWRSHLIIHQRIHTGEKPYKCNDCGKAFNRSSRLTQHQKIHMG

SEQ ID NO: 183 - DNA, 2843 bp, Homo sapiens
cctcaccttcctcgctgcgcgggcggcggttggtaaccggtcagaccagcccgagagggacctggtgcctgtacccaggcttctgtcgctctgtcgcctgcgctatgccctgctgtagtcacaggagctgtagagaggaccccggtacatctgaaagccgggaaatggacccagtggcctttgaggatgtggctgtgaacttcacccaggaagagtggacattgctggatatttcccagaagaatctcttcagggaagtgatgctggaaactttcaggaacctgacctctataggaaaaaaatggagtgaccagaacattgaatatgagtaccaaaaccccagaagaagcttcaggagtctcatagaagagaaagtcaatgaaattaaagaagacagtcattgtggagaaacttttacccaggttccagatgacagactgaacttccaggagaagaaagcttctcctgaagtaaaatcatgtgacagctttgtgtgtgcagaagttggcataggtaactcatcttttaatatgagcatcagaggtgacactggacacaaggcatatgagtatcaggaatatggaccaaagccatataagtgtcaacaacctaaaaataagaaagccttcaggtatcgcccatccattagaacacaagaaagggatcacactggagagaaaccctatgcttgtaaagtctgtggaaaaacctttattttccattcaagcattcgaagacacatggtaatgcacagtggggatggaacttataaatgtaaattttgtgggaaagccttccattctttcagtttatatcttatccatgaaagaactcacactggagagaaaccatatgaatgtaaacaatgtggtaaatcctttacttattctgctacccttcaaatacatgaaagaactcacactggggagaagccctatgaatgtagcaaatgtgataaagcatttcatagttctagttcctatcatagacatgaaagaagtcacatgggagagaagccttatcaatgcaaagaatgtggaaaagcatttgcatataccagttctcttcgtagacatgaaaggacccactctgggaaaaaaccgtatgaatgtaagcaatatggggaaggcttatcctatcttataagttttcaaacacacataagaatgaactctggagaaagaccttataaatgtaagatatgtgggaaaggcttttattctgccaagtcatttcaaacacatgaaaaaactcacactggagagaaacgctataaatgcaagcaatgtggtaaagccttcaatctttccagttcctttcgatatcatgaaaggattcacactggagagaaaccctatgagtgtaagcagtgtgggaaagccttcagatctgcctcacagcttcgagtgcacggtgggactcacactggagagaaaccctatgaatgtaaggaatgtgggaaagccttcagatctacctcacaccttcgagtgcatggtaggactcatactggagagaaaccctatgaatgtaaggaatgtgggaaagccttcagatatgtgaagcaccttcaaattcatgaaaggacagaaaaacacataagaatgccctctggagaaagaccttataaatgtagtatatgtgagaaaggcttttattctgccaagtcatttcaaacacatgaaaaaactcacactggagagaaaccctatgaatgcaaccaatgtggtaaagccttcagatgttgcaattcccttcgatatcatgaaaggactcacactggagagaaaccctatgagtgtaagcaatgtgggaaagccttcagatctgcctcacaccttcgaatgcatgaaaggactcacactggagagaaaccctatgagtgtaagcaatgtgggaaagccttcagttgtgcctcaaaccttcgaaagcatggtaggactcacactggagagaaaccctatgagtgtaagcaatgtgggaaagccttcagatctgcctcaaaccttcagatgcatgaaaggactcacactggagagaaaccctatgaatgtaaggaatgcgaaaaagcattctgtaaattctcttcttttcaaatacatgaaaggaagcacagaggagagaagccctatgaatgtaagcattgtgggaatggattcacatctgccaagattcttcaaatacatgcaagaacacacattggagagaaacactatgaatgtaaggaatgcggaaaagcattcaattatttttcttccttgcatatacacgcaaggactcatatgggagagaagccatatgaatgtaaggattgtgggaaagcattcagctagcctggttccttttatggacatgaatagactcacactggaaggaagcactatgaatgcaagcaatgtggcaaaactttcacattttccagttcttttcgatatcatgaaaggactcacactggggagaaaccctatcaatgtaagcagtgtgggaaagccttcattccttttacttcttttcaatgtcatgaaaggactcacacgggagagaaaccctatgagtgtattctagttccgtttgatatcatgaaaggacttacactggagtgaaaccctatgaatgtaagcaatgtgggaaagccttcagatgtgcctcgcaccttcaacggcatggaagggttcacacttgggagaaactctatgaatgtaagcagtatgggaaagccttcagatctgccaagattctttgaatacagataattaatgtaaacaattatcataagtatactaacatgttattctttttaaataagaaggtataataaaatatcccattggttttatgtatta

SEQ ID NO: 184 - protein, 742 aa, Homo sapiens
MPCCSHRSCREDPGTSESREMDPVAFEDVAVNFTQEEWTLLDISQKNLFREVMLETFRNLTSIGKKWSDQNIEYEYQNPRRSFRSLIEEKVNEIKEDSHCGETFTQVPDDRLNFQEKKASPEVKSCDSFVCAEVGIGNSSFNMSIRGDTGHKAYEYQEYGPKPYKCQQPKNKKAFRYRPSIRTQERDHTGEKPYACKVCGKTFIFHSSIRRHMVMHSGDGTYKCKFCGKAFHSFSLYLIHERTHTGEKPYECKQCGKSFTYSATLQIHERTHTGEKPYECSKCDKAFHSSSSYHRHERSHMGEKPYQCKECGKAFAYTSSLRRHERTHSGKKPYECKQYGEGLSYLISFQTHIRMNSGERPYKCKICGKGFYSAKSFQTHEKTHTGEKRYKCKQCGKAFNLSSSFRYHERIHTGEKPYECKQCGKAFRSASQLRVHGGTHTGEKPYECKECGKAFRSTSHLRVHGRTHTGEKPYECKECGKAFRYVKHLQIHERTEKHIRMPSGERPYKCSICEKGFYSAKSFQTHEKTHTGEKPYECNQCGKAFRCCNSLRYHERTHTGEKPYECKQCGKAFRSASHLRMHERTHTGEKPYECKQCGKAFSCASNLRKHGRTHTGEKPYECKQCGKAFRSASNLQMHERTHTGEKPYECKECEKAFCKFSSFQIHERKHRGEKPYECKHCGNGFTSAKILQIHARTHIGEKHYECKECGKAFNYFSSLHIHARTHMGEKPYECKDCGKAFS

SEQ ID NO: 185 - DNA, 1207 bp, Homo sapiens
gtccttgtcccaagggacatacagcacacagcctgtggagggtggaggaaccaactgcaagatcacttgtcctcctcaattgatgtacactgaagaaagagccaccttcaggctgtaaggtcatcgtataatcctgaccactcatttcccatcatgacactgctgttccttctctttctccttcttggatgtctgatacaaacagcctcagcttttcttagtgcctaaagtgtctgcaagtggaaatccagaggaagacagagagaaactgagttcctgacaatgcattcactagagaaagtgacttttgaagatgtagctattgacttcacccaggaagagtgggacatgatggacacatccaaaagaaagctgtacagagatgtgatgctggaaaatatcagtcacctggtgtccctcgggtaccagataagcaaatcctatataattttgcagctggagcaaggaaaagagctgtggtgggaaggaagagtatttcttcaagaccagaatccagacagggaaagtgcccttaagaaaaaacacatgatatccatgcatcctatcatcagaaaagacacatccaccagtatgacaatggagaactctctcattctggaggatccttttgaatataatgattcgggagaagattgcactcacagttccacaataactcagtgtttgttaactcacagtggaaagaaaccctgtgtcagcaaacagtgtggaaaatcccttcgtaatcttttgtcccctaaaccacgtaaacaaattcatactaaaggtaaatcatatcaatgtaatctatgtgaaaaggcctatactaattgcttttaccttagacggcacaagatgactcacactggagagaggccatatgcatgtcatctatgtggaaaagccttcactcagtgttctcaccttagaagacatgagaaaactcacacgggagagagaccatataagtgtcatcaatgtgggaaagcctttattcaatcctttaaccttcgaagacatgagagaactcaccttggacaaaagtgttatgaatgtgataaaagtgggaaagcctttagtcaaagctctggctttagaggaaacaaaataattcacattggagagaaaccacctgcttgtcttctatgtgggaaggccttcagtctgtcctccgaccttagatgacatgagagaacacgcactggag

SEQ ID NO: 186 - protein, 300 aa, Homo sapiens
MHSLEKVTFEDVAIDFTQEEWDMMDTSKRKLYRDVMLENISHLVSLGYQISKSYIILQLEQGKELWWEGRVFLQDQNPDRESALKKKHMISMHPIIRKDTSTSMTMENSLILEDPFEYNDSGEDCTHSSTITQCLLTHSGKKPCVSKQCGKSLRNLLSPKPRKQIHTKGKSYQCNLCEKAYTNCFYLRRHKMTHTGERPYACHLCGKAFTQCSHLRRHEKTHTGERPYKCHQCGKAFIQSFNLRRHERTHLGQKCYECDKSGKAFSQSSGFRGNKIIHIGEKPPACLLCGKAFSLSSDLR

SEQ ID NO: 187 - DNA, 2185 bp, Homo sapiens
gtaaaagtctgggctaccggcgcggcgtagtggatgcagcatcctagtggaggacgcccctgtgttgctgaacctgtttgcatgagttgctcctgacggccctttaggatacttccatgtctgtagggtctagagtgacatctcctcccctcccctgacgagatctgccctccttggcactgtgcttccccagaggggtggcctcgctgttcccatggacatggcccaggagccagtgaccttcagggacgtggccatctacttctcaagggaggagtgggcgtgtctggaacccagccagagggccctctaccgggacgtgatgctggacaacttcagcagtgtggctgctctgggattttgcagccccagaccagacctcgtctctcgcctggaacagtgggaggagccgtgggttgaagaccgggagagacctgagttccaggcagtgcagaggggaccccggccaggggcaaggaagtctgcagaccccaagagaccttgtgatcatccagcttgggctcacaagaaaacccacgtgcggcgagaaagagccagggaaggaagcagctttaggaagggcttcaggctggacacggatgacgggcagcttcccagagctgctccagaaaggacagacgccaagcccacggctttcccgtgtcaggtgctcacgcagcgttgtgggcggcggccgggccgcagagagcgccggaagcagcgcgcagtagagctgtcattcatctgcggcacgtgcgggaaggcgctcagctgccacagccggctgctcgctcaccagacggtgcacacgggaaccaaggccttcgagtgccccgagtgcggccagaccttccggtgggcttcaaacctgcagcgccaccagaagaaccacacgcgcgagaagcccttctgctgcgaggcctgcgggcaggcgttcagcctgaaggaccgcctggctcagcaccgcaaggtccacaccgagcacaggccctactcgtgtggcgactgtgggaaagccttcaagcagaagtccaaccttctcagacaccagctggtgcacaccggggagcggccgttctactgcgcggactgcggcaaagccttccggaccaaggagaacctcagccaccaccagagggtccacagcggggagaagccctacacctgtgccgagtgcggcaagtccttccggtggcccaagggcttcagcatccaccggaggctgcacctgacgaagaggttctacgagtgcggccactgtgggaaaggcttccgtcacctggggttcttcacgcggcatcagaggactcacaggcacggggaggtgtaggggcgcccgaagagtggggtgctgcgcctctgcgggagtactgggtcctgagggagagctgcagtgagaagttgctcttcagcctggaaaatcaacctgaattcagagaagccttcttagtcctcagagctccccagtcccccgagaagtttactgggaaaactgccaggtgggagaagcagagccatgggtacgccggagatggcgggggctctggagatggcgggggctgcgccccggcgccgggcatcctggggatgtgctgagagtgtgcgcgaccccggagccacgtgccaggccgggctcagaggcggagaagcctgcctggtgcccacagccgtctggctcagggactccaccctggccccgagtcgccgtctgctgggcctttccttcctggctctgcaccccatgctggctgcccggtctggcttcccttcttgtctctgtcttgggcgaggcagctgtgagcattgcacagaggcaaagaccctcctgcagcctctgcgctgggccgtagaaacaagagcctttgtaatactgaacctcattcaaggattaggagtggtggttaggtcagggccacccccagtgctgcaggaacggcctccacccagctctgttggtcagagcctgggtcatgcacctggagttgggagatcaagttgggtctcagggcagtgaggtggccatatccaccacatcgcatttcgtgggggaagaggtgacctctttgttttaaacttaaggtgtctgcttatccagccagaaataaaaatctgccagtggtgttcccaagggaagacccccgtgggaatgggtcgggacactgccgtgtttcaggttagccaatta

SEQ ID NO: 188 - protein, 371 aa, Homo sapiens
MDMAQEPVTFRDVAIYFSREEWACLEPSQRALYRDVMLDNFSSVAALGFCSPRPDLVSRLEQWEEPWVEDRERPEFQAVQRGPRPGARKSADPKRPCDHPAWAHKKTHVRRERAREGSSFRKGFRLDTDDGQLPRAAPERTDAKPTAFPCQVLTQRCGRRPGRRERRKQRAVELSFICGTCGKALSCHSRLLAHQTVHTGTKAFECPECGQTFRWASNLQRHQKNHTREKPFCCEACGQAFSLKDRLAQHRKVHTEHRPYSCGDCGKAFKQKSNLLRHQLVHTGERPFYCADCGKAFRTKENLSHHQRVHSGEKPYTCAECGKSFRWPKGFSIHRRLHLTKRFYECGHCGKGFRHLGFFTRHQRTHRHGEV

SEQ ID NO: 189 - DNA, 3558 bp, Homo sapiens
attgtcctggcagagcggcgagccggtgagtgtggctgcggggtcgcgcccaccctctacctgtgccgggggccggaacctggccccggggagggcgcggcctcggggagacggcgtgcaggcccagcactgttggtcaccgcaggcctgtcttcctattcaccgtgggcagcagagggatggctgctcagctgctgactgatgaggcactggaatcagtgacgttcagggatgtgactgtggacttcacccaggaggagtggcagcagctggagcctgcccagaaggacctgtacagggatgtcatgctggagaactacaggaacctggtctcactggactgggagactagacctgaaatgaaagagttggatccaaagaatgacatttcggaagacaagctctccgttgttggggaggccacggggggacccacgaggaatggtgccaggggtcctggctcagaaggagtgtgggaaccaggcagctggccagagaggccgcggggagatgcaggtgcagagtgggagccattgggaattccccaggggaacaaactcttagggggctcagtacccgcatgtcatgaactgaaggcatttgccaaccaaggctgtgtcctggtcccaccacggctggacgaccccacagaaaagggggcctgtccacccgtaaggcgtggcaagaacttctccagcacttcagacctcagtaagccccccatgccctgcgaggagaagaaaacctacgactgcagcgagtgtggcaaggcctttagccgaagctcgtccctgataaagcaccaaaggatccacacgggagaaaagccgtttgagtgtgacacctgtgggaagcacttcatcgagcgctcgtccctcaccatccaccagcgggtgcacacgggcgagaagccctatgcctgcggggactgcggcaaggccttcagccagcgcatgaacctcactgtgcaccagcgcacgcacacgggcgagaagccgtatgtgtgcgacgtgtgtggcaaggccttccggaagacttcctctctcacccagcacgagcggatccacacgggggagaagccctacgcgtgcggggactgcggcaaggccttcagccagaacatgcacctcatcgtgcaccagcgcacgcacaccggggagaagccgtacgtgtgccccgagtgcgggcgagccttcagccagaacatgcacctgaccgagcaccagcgcacgcacaccggggagaagccgtacgcctgcaaggagtgcggcaaggccttcaacaagagctcctcgctcaccctgcaccagaggaaccacaccggcgagaagccctacgtgtgcggcgagtgcggcaaggccttcagccagagctcctacctcatccagcaccagcgcttccacatcggcgtgaagccgttcgagtgcagcgagtgcggcaaggccttcagcaagaactcctcgctcacgcagcaccagcgcatccacaccggcgagaagccctacgagtgctacatctgcaagaagcacttcacggggcgctcgtccctcatcgtgcaccagatcgtgcacaccggggagaagccctacgtgtgcggcgagtgcggcaaggccttcagccagagcgcctacctcatcgagcaccagcggatccacaccggcgagaagccgtacaggtgcggccagtgcgggaagtccttcatcaagaactcctccctcactgtgcaccagcggatccacacgggcgagaagccctaccgatgcggcgagtgcgggaagaccttcagccgcaacacgaacctgacgcgccacctgcggattcacacctgagcgcctctgtgcagggctctcactggcggtgcccaggacggacgccagatggctgcgcgctttgtcagcagtgctgtgagaagttctcccctggggtggggactcggggtcaggggagctcaggaatgtggggttgtggaggggctggctgatcacacatgccccctccttactgagcctcagaaagcaagcccctcggtgtctgacgtatctggggacacttcaaggttcactgtagctgagccatggccgctggtaacagacatcagggttccagactagccctcttgagtaactgtcctagagctgggacaggtcacgcctgcctccacatctctgtttcttcagcgggaaagtggagctggtggaggggagggaggagacatctccctctttgtcagatacatcctggagtccagatgcagcttgtcaccatctgcattttctccgtgggttgggagcgtgagggccttcctatccctccacccaccgtttccctgcagtgcacgctggcagccaccaagctaggaagtggcaggagtttgccggttgtttgtgaggggaaaaatttttttttcagagttagcaaataacagtaactactgctttgaatgccaaagtttcttagagtggtctgttacgttttttaaaaataaaacttttaattaagggagactatgttattttaaacagtcttctgttttggccagttgtctggtcaaaatcggcttcagtgattgtgggaggggcaagaaggaaaagaaacagcagcaggtttgatattcagaaagaaatatgcatggattcaataagtatatacatctgagcacagattatttttatagtgatttttgcagctaaatgtgaaggcaactgtcttaagtcccttcctgctgctgtaacaaaagaccttagactgggtaatttataaacaatagaaatttgtcactcatggttctggatgctgggaagtccaagatcaaggctctggcagatttggtgtctgatggggtatgttcttcataggtagtgcttgtgtcttgatgtgtgtcttcacgtggttgtaaacggcagacttcctcaggccccttataagggtgctaatcccagtcacaagggccctgacctcatgacctcccaaaggtcctccctcttcatactgttacattggggatcaagtttccaatatgtgaatacagggaagcaccaacagaccatatcagtaacttcgagtgagtttcctaaggccgactgaagctctgtttacacataagagtgttccccaaagtgcactttctctggggccttttaggccatacttttaattttgttatttgatactactggttgctaatgttctggcatttccagttgttccacactccctgacactggtgtacacaaataaataatacagaaaaaaaattatatcagcaagcacattctgcaaataagaaaaacagccactcgggcacgtataaacaaggtggaccgtttttcaaattctggcagtcaagtgggcctcagggtgggtttgattcaggctctcatcattggagccatagctgtggttctctgtgatgctctggctctcccttcatacttcttaacatcatcctcaggctggcttcccacgtgggattgtggtggtttccagcagcgagtcttgatcagacattgctttagttgcatctgttgtgggaataaatgagaatatgtatgcactgca

SEQ ID NO: 190 - protein, 549 aa, Homo sapiens
MAAQLLTDEALESVTFRDVTVDFTQEEWQQLEPAQKDLYRDVMLENYRNLVSLDWETRPEMKELDPKNDISEDKLSVVGEATGGPTRNGARGPGSEGVWEPGSWPERPRGDAGAEWEPLGIPQGNKLLGGSVPACHELKAFANQGCVLVPPRLDDPTEKGACPPVRRGKNFSSTSDLSKPPMPCEEKKTYDCSECGKAFSRSSSLIKHQRIHTGEKPFECDTCGKHFIERSSLTIHQRVHTGEKPYACGDCGKAFSQRMNLTVHQRTHTGEKPYVCDVCGKAFRKTSSLTQHERIHTGEKPYACGDCGKAFSQNMHLIVHQRTHTGEKPYVCPECGRAFSQNMHLTEHQRTHTGEKPYACKECGKAFNKSSSLTLHQRNHTGEKPYVCGECGKAFSQSSYLIQHQRFHIGVKPFECSECGKAFSKNSSLTQHQRIHTGEKPYECYICKKHFTGRSSLIVHQIVHTGEKPYVCGECGKAFSQSAYLIEHQRIHTGEKPYRCGQCGKSFIKNSSLTVHQRIHTGEKPYRCGECGKTFSRNTNLTRHLRIHT

SEQ ID NO: 191 - DNA, 4358 bp, Homo sapiens
agcgtcttgcgccgccattgcggggaggctgtcctcagagcaggtctggcgcgccggtggctggaccggccccaggagcccagtcaccgggcgtcattggctcaggctgcggggccctcggcaccttctccctcccgggtccaccgcggcggcggcggcggcggcggcggcggcggcggcggcgtcagggggcggagcctgccgaagcgccctttgtctgcggaggtcaacatacctggcctaaggaggcaggattgagtgactctcactcaccactggtgttgctctttgaaagtggcgcttggcaccagcatgaactccccatcctcagcaatcccatcaggtgttttgggtcttcaacctaaaattctatcttacaagatccttgccaggatgcagatttgaatactatagtgaagtctgtacatgaagaaatgatgcttttagggaggaaaaaaaaaggtaataacaaccttcaagagccccttcatctcaactcggcataaacaaggcaagattctgagagtggccgcccctggaagcagaaattattcttgtggctatccattggctcctgaggctctaatcagagatggggcacctttagtaccaggggagtgactgttgcccataaggtactggacatcaactttcaagagcagccccagctccttaagctgctggtcctggtgcatctgctgactttcatgtagaagatagcagagctttggcgacattacaacataagaactgcagagaggtgtaatcccagtggaagactgaatcgagagactcaaaaaggaagttatgccttctcagaatgctgttttttctcaggaggggaacatggaggaggaagaaatgaatgatggctcacagatggtgagatctcaggaatcactgacgtttcaggatgtggccgtggacttcaccagagaggagtgggaccagctgtaccctgcccaaaagaacctctatcgagacgtgatgctggagaactacaggaatctagttgcactggggtatcagctttgtaagccagaggtaatcgcgcagttggagctagaggaagaatgggtgatagaaagagacagcctgctggatactcatccagatggagaaaacagacccgaaatcaaaaagtcaaccacaagccagaatatttctgatgaaaatcaaacccatgagatgataatggagagactcgcaggagacagcttctggtactccatcctaggaggactctgggattttgattaccatccagagtttaaccaagaaaaccacaagagatatttaggacaagtaactttgacccacaaaaagatcacacaggagagaagccttgagtgtaataaatttgcagaaaactgtaatctgaactcaaaccttatgcagcagagaattccttccattaaaatacccctgaattctgacacacagggaaacagcatcaaacataattcagacttgatttactatcagggaaattatgtaagagagactccctatgaatatagtgagtgtggaaaaatcttcaatcaacatattcttcttactgatcatattcatactgcagagaaacccagtgagtgtgggaaggccttcagccacacctcatctcttagccagcctcagatgttgcttacaggagagaagccctataagtgtgatgaatgtggaaaaagattcagccagaggatacatctcattcaacatcagagaattcacacaggagaaaagccttttatatgcaatggatgtgggaaagccttccgtcagcattcatcctttactcaacatctgaggattcatactggagaaaagccctataaatgtaatcaatgtggtaaagcttttagccgcatcacatcccttactgaacatcatagacttcataccggagagaaaccttacgaatgtggtttctgtggcaaagccttcagtcagaggacacatctgaatcaacatgaaagaactcatacaggagagaaaccctataaatgtaatgaatgcgggaaagcctttagccagagtgcacaccttaatcaacacaggaaaatccatactcgggagaaattatgtgaatataaatgtgagcaaactgttcgccacagtccttcatttagcagcacataacttatggtgggggaaatcagataaatatataaatgtaggagattttttggtcagacctttttatcccattcaatatcaaattattcatagtggagagaaagcttatacataaatttttgttttgttttgtttttgagactgagtctcactctgtcacccaggctgaagtgcagtggtacaatcttggctcactgcaacctctgccacctgggttcaagcgattctcctgcctcagcctcctgagtagctgggaccacaggtatgcaccaccacgcccagctaattttttgtatttttagtagagacggggtttcaccatgttggccaggctggtctcgaactcctaacctcaggtgatccgcccacctcggcctcccaaagtgctgggattacaggcgtgggccactgcgcctggccataaactttcaatgcgtagaaaccaaattaatttagaccttaaactagcagcatattacattcccaggaggggttataaaaagaaaaaataatttattttacaaatgagattatatttggagtcatgttccaaatctgatataaaactttttaaaaaatcagaagtccttatccaggcatggtggtgcacacctgcaatcccagctactctggagactgaggcatgagaatgacttgaacatgggaggtggaggttgctgtgagctgagatcatgccactgtactccagcctgggcaacagagcaagactctgtctcaaaaaaaaaaaagaaagaaagcctataggcaacaacttgtaattactcacctgtaagttttatggtataaaacttttttttttttttttttttgaggcagagtctcgctctgccacccaggctggagtgcaatggcgcgatctcggctcacagcaacctccacctcctgggttccagcgattcttctgcttcagcctcccgagtagctgggactacaggtgcgtaccaccacgcctggctaactttttttttgtattttttagtagagacacggtttcaccatattgactaggctggtctcgaactcctgaccttgtgatctgcccgcctcggcctcccaaagtgctgggattataggcgtgagcaactgcacctggcaggttatggtataaaacttttaaatcagaaattttgattaattaaagacaatgctggctgggggcggtggttcacgcctataatcccagcactttgggaggccgaggtggggtgatcatctgaggccaggagtttgagaccagcctggccaacatggtaaaaccccatctctactaaaaatacaaaaattagctgggtatggtggtgcacgcctgtagtctcagcagcttgggaggctgaggcagaagaattgcttgaacccggtaggtggaggttgcagtgagccaagatcacgccactgtactccagcctgggcaacagagtgagactgtctcaaaaaaaaaaaaaagtaaaatttaaaaataaaggcgatgctgtagtgcagccagtcacattaacttgaaataaacataaaagaggaatatttcacgaacgtcagttatttgtatgctttctttacagtttttaccatatctagtatttacttaatattctttataaagggatgcaagatttttagccttctcctaggaaatactatttagcatataaaataagttatatgctagttttatatgctaattaaatttattctactcttcatcaaaatagatacataaccttgaaattaaaaatattcgttgatgtccccccaaaaatcttgtgtgccgttgtttgagaaacagtgtgatagtttgtggcaatatcctgtgatgattctttttgcaatcttgacattattttcatcaaatgaatcctaggatcactttgagaagagccttgaagaagacttgagggtcctattgatgaactttgaaatattgattcagagaagtctgcttttctattttgttttagctttaaatttccctgtggcaagtctagattttttttcagttaaaattatttctgctgtatttgtagaacagaagttttgggattttgtaaaataatgaccagagactaagaattcccatgccaccccgtatcactgtggaagatggagaagtgaggaactgtacctgcgggtgagccctggtgccatgttgagggtgggaatcaggagagctgcagtggcttatataaacacctgacgaagtagtctaa

SEQ ID NO: 192 - protein, 443 aa, Homo sapiens
MPSQNAVFSQEGNMEEEEMNDGSQMVRSQESLTFQDVAVDFTREEWDQLYPAQKNLYRDVMLENYRNLVALGYQLCKPEVIAQLELEEEWVIERDSLLDTHPDGENRPEIKKSTTSQNISDENQTHEMIMERLAGDSFWYSILGGLWDFDYHPEFNQENHKRYLGQVTLTHKKITQERSLECNKFAENCNLNSNLMQQRIPSIKIPLNSDTQGNSIKHNSDLIYYQGNYVRETPYEYSECGKIFNQHILLTDHIHTAEKPSECGKAFSHTSSLSQPQMLLTGEKPYKCDECGKRFSQRIHLIQHQRIHTGEKPFICNGCGKAFRQHSSFTQHLRIHTGEKPYKCNQCGKAFSRITSLTEHHRLHTGEKPYECGFCGKAFSQRTHLNQHERTHTGEKPYKCNECGKAFSQSAHLNQHRKIHTREKLCEYKCEQTVRHSPSFSST

SEQ ID NO: 193 - DNA, 5210 bp, Homo sapiens
ctttttgcttctctgcgcccagagctccagtccttctcttcactgctctgcgtcctctgctcctggaggccaagcctctgtggccttgtgtcctgcaagtattcgcagatttatggctaaaagaccgggaccccctggaagccgagaaatgggactgttgacattcagagacatagctatagaattttctctggcggaatggcaatgcctggatcatgctcagcagaatttatatagagatgtgatgttagagaactacagaaacctggtctccctgggtattgctgtctctaagccagacttgatcacctgtctggagcaaaataaagagccccagaatataaagagaaatgagatggtagccaaacacccagttacatgttctcatttcacccaagaccttcagtcagagcagggcataaaagattcactccaaaaagtgatactgagaagatatggaaaatgtggacaggaggatttacaagtaaaaaaatgctgtaaaagtgtaggtgagtgtgaggtgcacaaaggaggttataattatgttaaccaatgtttgtcagctacccaaaacaaaacatttcagactcataaatgcgtcaaagtctttggtaaattttcaaattccaatagacacaagacaagacatactggaaagaaacatttcaaatgtaaaaacgatggcaaatcattttgcatgctttcacgcctaaatcaacatcagataattcatactagggagaagtcttacaaatgtgaagaatgtggcaaatcctttaactgctcttcaacccttactagacataaaagaattcatactggagagaaaccctacagatgtgaggaatgtggcaaagcttttagctggtctgcatcccttactaaacataagagaattcatactggagagaaaccttacacatgtgaagaacgtggcaaagtctttagccgctcaacacttactaactacaagagaattcatactggagagaaaccctacacatgtgaagaatgtggcaaagcctttagccgctcttcaacacttactaaccacaagagaattcatactggagagagaccctacaaatgtgaagaatgtggcaaagcctttagcttatcctcaacccttaagaaacataagatagttcatactggggagaaactctacacatgtgaagaatgtgggaaagcctttaccttctcctcaactctaaatactcataagaggattcatactggagagaaaccctacacttgtgaagaatgtggcaaagcctttagcttaccctcaaccttcacttaccacaagagaactcatactggagagaaaccctacaaatgtgaagaatgtggcaaagcctttaactgctcctcaacccttaagaaacataagataattcatactggagagaaactctacaaatgtaaagaatgtgggaaagcctttaccttctcctcaactctaaatactcataagaggattcatactggagagaaaccctacaaatgtgaagaatgtgaccaaacttttaagtggcattcaagtcttgctaatcataagaatatgcatactggagagaaaccctacaaatatgaataatgtggtaaagtccagccctcaggccttataatacataaaataatttatactggaaaaaatcactacaagtgtggagaatgtggccaattctttaaccagttccaaaccactgctgtccataagataattcatattggacaaaagtcttataaatgtaaaaaaaaaagtaacagcctttaaccacccctcaaaccttaatgaacccaagagaatttatttaaaaaaatttttttgagacagagtctcactttgtcacccaggctggagtgcagtggcacgatgtcagctcactgcaacctctgcctcctgggttcaagcgattctcctgcctcagcctcctgagtagctggaattacaggcacgtgcaaccacactggctgagttttgtatttttagtagagatggggtttcaccattttgaccaggctggtctcaaactcctgacttcaggtgaaccacctgcctcagcctcccaaagcctaagagaatttatattagagagactctacaaaggtcaaaaatgtgacaaaacatttaagcacatctcaggccttacacaatatcagataattcattctagagacaaaccctacaaaaacaatgtggtaaagcttttacctagtcttgaacccttattatacactaaaagaattgatactgaagaaaaaccctacaataaggaatatggaaatgtcttttaaaagtcctcaaactttttgtttgaataaatgtaaaataattgatactggagagaacccctgcaattgtaaaaaaaaaaaaaaatgtggcaaagcttttaactggttctccatctttattaattaaaatattttatactggagagaaactctacatacataaaaaatgtgacagcatttaaccacacctgacatttttctaaaatagagaaatcatactggtgaaaaactctagaaatgtgttaaatgaggtaagtcctttaaatggtagttgcatgttatggtaggtaagataatttatactgaagaaaactcaggcaaatatgaaaaatgtggcaaaacttttaacaaattttcccatcttattgcacaggaagccttttatactagagaaaaattgtaaaaatataaagaatgtgaaaagccattaatgtctgttcacatcttactcaatatcagaaagtttatacttaacaaaagcattataggctagatgtggtggctcatgcctgtaatcccagcactttgggagctcatggcaggtggatcatgaggtcaggagttcaagaccagcctggctaacatggtgaatccccatctctactaaaaacacaaaaattagacaggcatggtggtgtgcacctgtaatcccagctactcaggaggctgaagcaggagaattgcttgaacccaggtggtggaggttgcagtgagtcaagatcaccccaccatactccagcctgggtgacagagcaagaatccatcttaaaaaaaaaaaaaaagcgtaaatgtgattactgtaaaaagacctttcagaaaacataggcctttaaagcaaagactatttattctaaagacaaacattaaaacataaagaggattgtgtagtacctttatttgtattacggattttattgtacacattttatatcaaaggaaaaccctgaaacagatgctcaaactttgttgaacatcggagaatttatattggagagaaagtgtaaatgaatgtcaaaaaatatttgttcaaaaactacagtttagaaaacactagtttatactaaaaaaatatttttgcagatgcagtaaatggggaaaatatgtttaatcaaaaattaagtctacataaacatttgaggattcacagtagaaagaatgaaggtgctgaaacttcagacattacactaaatcagagtgttgagtgtaaaaaagatataaatctaacaatataaatttaaagaagtagatttatttggagatttataattacattcgaggtatgcttctttctttgtaaaaaaaaatatagattttctgaaaagcaaatagtaatgtaactcacatttcaaattacttcatgttgatcctttcttcccattgtttctgtgaaagtattggaccaattgttgaatcagagatatgagattgttttttataggtgtccattattcatgaactttcctatggatgagtaaggacattaagttgtaagatgcataatgaaaatctaaatggagaggttctttgtggttgacttataacattgttttagtgatgtataaggcgagcgttcagagtaatattctaaattctagtgaggaaaacctttgaacgtcagtagtaaattattttatcaattgtacctttatgtaaacaaagttgtttttaatgagctaaaactattgtgctttgaaagaagtattaagctgccattgactctatcgtgtctcatcttaaggttctgcgtaaaagatggtgacaatatactatttgttaatgtaggggaatgacatcactagtagtctcttttttgccagtgtttttgtttgtttgttttgagactaagtcttactctgtcacccagactggggtgcagtggtgcgatctcagctcactgcaacctccacctcctgggtccaagtgattctcctgcttcagcctcacaagtagctggaactagaggcaggcaccaccactcctggctaatttttgtatttttagtagagatgaggtttccccatgttggccaggctggtctcaaactcctgacctcaggtgatacacccacctcggtgtaccgaagtgctgggattacaggcatgagccaccatgcctggcctactagaggttttacacagcaaacaagttgaagaattttgttcccataggacaaatttgtacttttttaccttatttaatttttttttaatttttgtgggtagtgtgcatacacacttatggcatatatgagatatgttaacacatgcacataatatttaatgatcacaacagagtaaatgaggcattcatcaccttgagcatgtatttatcctttgtattacaaacaatcccattatacagttttagttatttcaatatgtgcaattgaattactattaaccacagggtcattttatgatcataaaaattacatgagtataattaatacccatacatttctgagtcttgattaaatatttttaaaattttgttttataaattttttgcacatgtggcatctctgctgacaaacaaaaacagacttttagtttcaatttacatagagttacatatacaaatatattactctaaagatataccagccgagcacagtggctcccagcattttgggagcctgaggtgggaggatcatttgaggttaggagttcaagaccagcctggccaacatggtgaaaccccatctctactaaaaatacaaaaaattagctgggcatggtggtgcatgcccatggtcccagttactcaggaggctgaggcaggagaattgcttgaacctcggaggtggaggtagcagtgagctgagatggtgctactgcactccagcctgggtgaaagagcgagaaaccatctcaaaaaaaaaaataaataaataaaagatataccttaagcat

SEQ ID NO: 194 - protein, 495 aa, Homo sapiens
MAKRPGPPGSREMGLLTFRDIAIEFSLAEWQCLDHAQQNLYRDVMLENYRNLVSLGIAVSKPDLITCLEQNKEPQNIKRNEMVAKHPVTCSHFTQDLQSEQGIKDSLQKVILRRYGKCGQEDLQVKKCCKSVGECEVHKGGYNYVNQCLSATQNKTFQTHKCVKVFGKFSNSNRHKTRHTGKKHFKCKNDGKSFCMLSRLNQHQIIHTREKSYKCEECGKSFNCSSTLTRHKRIHTGEKPYRCEECGKAFSWSASLTKHKRIHTGEKPYTCEERGKVFSRSTLTNYKRIHTGEKPYTCEECGKAFSRSSTLTNHKRIHTGERPYKCEECGKAFSLSSTLKKHKIVHTGEKLYTCEECGKAFTFSSTLNTHKRIHTGEKPYTCEECGKAFSLPSTFTYHKRTHTGEKPYKCEECGKAFNCSSTLKKHKIIHTGEKLYKCKECGKAFTFSSTLNTHKRIHTGEKPYKCEECDQTFKWHSSLANHKNMHTGEKPYKYE

SEQ ID NO: 195 - DNA, 2798 bp, Homo sapiens
gcctttgtctctcgctgcagctggagcgcttggtctcgtcttccctgctttgtgtcccctgctcttagaggcccagcctctgtggccctctgacctgcaagcattgggagatccacagctaagacgccagggcctcccctggaagcctagaaatgggaccattgacatttatggatgtggccatagaattctctgtggaggagtggcaatgcctggacactgcacagcagaatttatataggaacgtgatgttagagaactacagaaacctggtcttcctgggtattgctgtctctaagccagacctgatcacctgtctggagcaaggcaaagagccctggaatatggagagacatgagatggtggccaaacccccaggtatgtgttgttattttgcccaagaccttcggccagagcagagcataaaagcttctttgcaaagaataatactgagaaaatatgaaaaatgtggacatcacaatttacagttaaaaaaaggctataaaagtgtggatgagtacaaggtgcacaaaggaagttataatggatttaaccagtgtttgacaactacccagagcaaaatatttcagtgtgataaatatgtgaaagactttcataaattttcaaattcaaatagacataagactgaaaagaatcctttcaaatgtaaagaatgtggcaagtcattttgtgttctttcacacctaactcaacataaaagaattcacactactgtcaattcctacaaacttgaagaatgtggcaaggcctttaatgtgtcctcaaccctttctcaacataagagaattcatacaggacaaaaacactacaaatgtgaagaatgtggcatagcctttaacaagtcctcacaccttaacacacataagataattcatactggagagaaatcctacaaacgtgaagaatgtggaaaagcttttaacatatcctcacaccttactacacataagataattcatactggagagaatgcctacaaatgtaaagaatgtggcaaagcttttaaccaatcatcaacccttactagacataagataattcatgctggagagaagccctacatatgtgaacattgtggcagagcttttaaccaatcctcgaaccttactaaacataagagaattcatactggtgataaaccttataaatgtgaagaatgtggcaaagcctttaatgtgtcctcaacccttactcaacataagagaattcatactggagagaaaccttacaaatgtgaagagtgtggcaaagcctttaacgtgtcctcaactcttactcaacataagagaattcatactggagaaaaaccatacaaatgtgaagaatgtggcaaagcctttaacacatcctcacacctcaccacacataaaagaattcataccggagagaaaccctacaaatgtgaagaatgtggcaaagcctttaaccagttctcacaacttactacacataagataattcatactggagagaaaccctacaaatgtaaagaatgtggcaaagcttttaagcggtcctcaaaccttactgaacataggataattcatactggagagaaaccctacaaatgtgaagaatgtggcaaagcttttaacctatcctcacaccttacaacacataagaaaattcatactggagagaaaccctacaaatgtaaagaatgtggcaaagcttttaaccaatcctcgacacttgctagacataagataattcatgctggagagaaaccctacaaatgtgaagaatgtggcaaagctttttaccaatactcaaaccttactcaacataagataattcatactggagagaaaccctacaaatgtgaagaatgtggcaaagcctttaattggtcctcaactctgactaaacataaggtaattcatactggagagaaaccctacaaatgtaaagaatgtggcaaagcttttaaccaatgctcaaaccttactacacacaagaaaattcatgctgtagaaaaatctgacaaataagaaaaatggaccaggcgtggtggctcacacctgtaatcccagcactttgggaggccaaggcgggtggatcacaagatcaagagattgagaccatcctggccaacgaagagaattactggagagaaaccgtacaaacctgaaagatataacagtgcagttgacaacacctcaatatttctaaacacctttaaatggttgtcatacttgattgtaggtaaaatatagtagaggaaacctctacaagtgtgaagaatgtggcaaaacttttaaccaatgctgacactttattggacaggaaatgatgtatacttgagaaaaattatgcaaatgtaaagaatgtgaagaagccattaatatctgttcacatcttattcaatatcagagagttcatacttaatagaagcattaaagatgaaattactgtcaatagatttttcagaaaatataagcctttaaagtgaagaagagtatttattttgaagacaagcattaaaatatcaagagtgtaagctgggcatggtggctcaggcctgtaatttcagcactttggaggccaaggcaggtggtttacttgaggtcagaagttcaagaccagcctggccaacatggtgaaactccatctctacccaaaatacaaaaattaggtgggtgtggtagtgcatgactaatcccagctactcggtggttgagacaggagaatcgcttgaacctgggaggcagaggttgcagtgagctgagtttgtgccaccacactccagcctgggcactccagctgcactccatctc

SEQ ID NO: 196 - protein, 619 aa, Homo sapiens
MGPLTFMDVAIEFSVEEWQCLDTAQQNLYRNVMLENYRNLVFLGIAVSKPDLITCLEQGKEPWNMERHEMVAKPPGMCCYFAQDLRPEQSIKASLQRIILRKYEKCGHHNLQLKKGYKSVDEYKVHKGSYNGFNQCLTTTQSKIFQCDKYVKDFHKFSNSNRHKTEKNPFKCKECGKSFCVLSHLTQHKRIHTTVNSYKLEECGKAFNVSSTLSQHKRIHTGQKHYKCEECGIAFNKSSHLNTHKIIHTGEKSYKREECGKAFNISSHLTTHKIIHTGENAYKCKECGKAFNQSSTLTRHKIIHAGEKPYICEHCGRAFNQSSNLTKHKRIHTGDKPYKCEECGKAFNVSSTLTQHKRIHTGEKPYKCEECGKAFNVSSTLTQHKRIHTGEKPYKCEECGKAFNTSSHLTTHKRIHTGEKPYKCEECGKAFNQFSQLTTHKIIHTGEKPYKCKECGKAFKRSSNLTEHRIIHTGEKPYKCEECGKAFNLSSHLTTHKKIHTGEKPYKCKECGKAFNQSSTLARHKIIHAGEKPYKCEECGKAFYQYSNLTQHKIIHTGEKPYKCEECGKAFNWSSTLTKHKVIHTGEKPYKCKECGKAFNQCSNLTTHKKIHAVEKSDK

SEQ ID NO: 197 - DNA, 8961 bp, Homo sapiens
gcggcctcttcaatatggcggggcctttgtctcctagcttccgggctctgatcctagttcgcgtctccactgttccatctcctccgttcctggagttcctcggtgactctactatagcttctgttatcctgtgacctgcaggtactgggagatccatagggaggacggcggaacatctggaggctgggaaatgggagtgttgacattcagggatgtggctgtagaattctccccagaagagtgggaatgcctggactctgctcagcagcgtttgtatagggatgtgatgttagagaactatggaaacctggtctccttgggtcttgctatctttaagccagacttgatgacctgtctggagcaaagaaaagagccttggaaagtgaagagacaggaggcagtagccaaacacccagctggttcttttcattttactgcagagatattgccggatcatgacataaaagattcatttcaaaaagtgattctgagaaaatatggaagctgtgaccttaataatttacatttaaagaaagactaccaaagtgtgggtaattgcaaggggcagaaaagcagttataatggccttcatcaatgtttgtcagctacccatagcaaaacctgtcaatgtaataaatgtggcagaggttttcagttgtgctcaatcttcactgaacataaagacatttttagcagagagaaatgccacaaatgtgaagaatgtggcaaagactgtaggttgttctcagattttactagacataagaaaattcatactgtagagagatgctacaaatgtgaagaatgtggcaaagcgtttaaaaagttttcaaaccttactgaacataagagagttcatactggagagaaaccttacaaatgtgaaggatgtggcaaaacttttacctgctcctcaacccttgttaaacacaagagaaatcatactggagacagaccctacaaatgtgaagaatgtggcaaagcctttaagtgcttctcagaccttactaatcataagagaattcatactggagagaaaccctacaaatgtgaagaatgtaacaaagcctataggtggttctcagaccttgctaaacataagataattcatactggagacaaaccctacacatgtaatgaatgtggaaaagcttttaagtggttctcggcccttagtaaacataagagaattcatactggagagaaaccctacatctgtgaagaatgtggcaaagcctttacccgctcctcaaccctttttaaccacaagagaattcatatggaagagagaccttacaaatgtgaagaatgcagcaaaacctttaagtgcttctcagacctgactaatcataagagaattcacactggagagaaaccctacaaatgtgaagaatgtggcaaagcatcgagctggttctcacacctcatcagacataagagaattcatactagagagaagctccacaagtgttaaaaatgtggaaaagcctttaccaagtcctcatactgtgttcaacatctgaaatttaatactgaacaaatgcagtataaatgtaatgacagtggaagaacatttatcatcttagagggtctctaagaacttactttataatctggttgcttatatgttgggtacatatatagccctttgctattatgtaatgccctttttttttaaatctatgttaatttcaagtctgttttgtcagaaactaggattgcaacccctgcttcttttcctgttttctatttgcttggtaggcttttctttttccctttattttgagcttatttgagatgggtgtcttgattaaagcataccattagatcttgattcttttttcagcttgccatctgtgctttaatttgggtatttagcccatttacatttaaggttagtattcatatgtgtggattggattctgttattaggatcttagctggctattttgcacatttgtttctgtggttgctttatagtgtccacagtttgtatactttagtgtgcttttgtagtgactggtaatagtctttttcttatttaatgctttcttcagaagctcttttaagacagatcctgtggtaacattttctcagcatttgcttgtctgaataggatcatatatattttttacttctgaagcttaccttggtcagatatgaaattctgtgttggaattctttttttaagaatgttgaatattggcccctataatctcttttgacttgtaggatttcagctgaaagatttgttgttttcctgatgagcttctttttagaggtgacctggcctttctctctagctgcctttaacatattttttctttcattttgaccctggagaatctcatgattatgtgtcttgaggatgaccttctcctggggtatcttactggggttctccacatttcctgcatttgaatgttggcctctctaggttggggaagttctcatggatgttatcctgaaatacgtatttcaagttgttttcattctccccatcactttcaggcaatctcttgcatcatagatttggtttctttacataatcccatatttcttagaggttttgttcattcctctttattcttttttcactgttcttgtctgtctgatttcagaaagccagtcttgaggccctgagattctttcctctgcttggcctattctgctgttaatatatgtgattacattataaaggttttgtattgtgtttttcagttctatcaggttggccacattttttctccagactggctgttttttccgtcagttcctgcaattttttttcctcccttgcattgggttgcaaattacttttgtaactcagtgaagtttgtttctacccatattctgaattctacttctgtcatcttaggccttgctggaaatgtaatttggtcatttggatgaaagaagtcactctggctttttgtgtttttatctttgcactgattgtgtcttatctttgtgggcatatctttgaggttgctgacctttgggcttttttttttttaatcctatttgatggtcttgagtatttgattgtggtataagatggatgcagccaacaggctttgttcctgggaggttttttttgttttgttttgttttgttttgttttgtttggtggtggtggtgggtgggcaatgctcagctcacaactcagaggctgcatactctaactccgggggacttgttttgagccccaactgtgttctctggctccttgagatttggagtttgcgagtttgtgggatgaaggtgccatagctggagcagagtgctagtggatatgggatttctgcctgtctttgggtactcacctcagtggcaggagcaaagcagctgggaagggagtgggggatacctgctggaggctgtgtgctgttgcactaaaggtggtgttggcttggggcaggatactggccagtaaaggttttgatgccttctctgtgccccccaagaaagagtgattgttcagagtgtgggaggttaccctgttctctgcacagtgttagcacaaaggcaggggtggagttttctggctctctgcccaccaaagtttcatctacaatggcagttgctgggggtggcggggcatattgcattcccatttgctggtggggcaagcaaagccaaacctgcctttgcagacatgtgccagcaaagaaatatcaggagttgccatggtgtcacgggaagctgcagtatggggaagaaatgtgggctggtgcagtcataggggctgctttgctggagctcttcatgagtcaggcatgtccctccagtgcagatgctctggtatgagcttccagggtacctgagactgccctgtaagcagctgtggccagactgggtccctgggagaggccagcagaccaaggagtgctcagttggaccagcttcttctgatttgcaagaccatcctgcagaaattaggcccaacagttcccgtagggctaaagtctcttatgggagacagttgagcctagagaaatggccatcactggccacactttactacagatgctcttgcaccaaaccctctggccaccacatgagctggcttgctgcattatctctttgcttgtcttctgggggctgcatctcagagagatgtaggtcagcaattactcagtgcagccagcccaggatggaagatctttacttttggccaagttaggggtttactgtctgctgaggagcagtgggtagtttgtgggacccatggaggatgggctggcttcctctccttgggtaaactgcagtttgaggtgtgaataaggcacttagggtttgggattttttattagtctgagggtagcaaggacagttgtactgcagaggcccctggaggctctgtccagggagttgctaagctgctactggctcaatagctctggcaatgattggctagtggcccgggcctggagaacctgcctcgtgagaatatatgagaacaggcactcacgtaacagtccgaccacttctgaagggctgctgcagtatgctgggtgtccactacagtttctagtcacctcagattttccagtactggaagttatcaccactgaatgctgcaaaacagcaacaatggcagcatgcccttttctctgggagcgccatcccagggaggtatagacctgttgccagcccaaaagcacctgtaggaggtagctggaagcccctgttgaaggtcctacccagtgaggaaaacatgattggggacccacttaagaaagcagtctagccatatttttgcaggacagctctgctattcagaggtaccacttccacccccagtttatttggattctccaaagccagaaggctggaacagctaactcacacaaacagcaaaaatggcagctcactcctccctctaggaactgtatcccaaagaggtttcaaaactccatcaaccaaagagcgctggtggtggtagctggagaccctcattgggaagtactttccagtgagaaggaatgaaacgggggacctgctttaacaggcagtctggccatgtctttttagagcacctgtactgtgctaggagatcctttccgccccccggtcagcttgggctcttcaaagcctgaaggctggaatggctaagttgctcaagcagcaaagatggtggcccactcctctttctggtagctccatcccagggaggtgcagtgctgctaccaatggttggctggaatctaagccagtaggtcttaccacgtgaggcattgttgaagtgggtcctacagaccatcactatcagccccctggattctgcctctttcctatgggtatgttcaggggtgtaacctgctttgctcgagttgcagctactttttctgggaagcctggaaagccagtatctaaggctcttgaatctgcgcaggcctaagtggcttatctgctgagactccatgtagctctgtgtgttaaactgaaggccttggtgaagtgggttcatgagggtatctcctcacctgaaggttgcagagatctgtgggagaatcatgggtttctagggtcacacatgcactcactgctttactgggtggggaggttcccttggctccatgttgttcccaggtggcccattgtcctgccttgctttactccattctccatagattgtttctttgattattcccaatgcaagtacctggatgtttcagttgcaggtgctgtatttatgtataccttgcattcctgtctatgagaactgcacagtctagctgcttctagtcagcaatctcgatcacttttctctaaagggaacctacttttttatattaaaaggattcaatatttttcaaaagcaaatttcaatataatttaactcttacatttgatgctgtgtcttcatttctagaatttatgtgaaagaacatggtcagtggttgcaccagagttgtgagaggttcttctatattagatggacagatttatatacttttccatggaggattaagtaaactgaaacctaagacacacgaagaaattctaagtggaaaggccacttattagtttacagcagtatcgtaagtgacaggatgataggagtgtggtaagtgatcaggataataatctgcttagtaagagaaacaatttgaattttagaaggaaattgccttaccatttgcaaattaaggtaattaaaatacagtgaatttcaaaatgcctttttaatgacaatgtgtgaacttaatttgttttaataaaccaaaattattgttattgtgttaaggctattttacattgaatgtgtatcttgccactgatgttaacttatcccatcttacccaaggttgtaggtaacaatatactattgggtgacagtggactaacatctctagtgatccctttgtcagtggtctttaacttaaaataatttagagaatatggtttctacaacttacatttttgtttacttgtaactacagattattatgatggttgtaatgaagattatgagtataattggagctatatgtttctgaattctgaacaactatttataaaattttatcctacttttttctgttgaacatatgacttctctggtctgctaaacacatacagacctttagttttggtttacatggatttaaatatatagatatatcactgtaaaataaacttcaggtgtaacagatttatagagaaagtaatcatatttgtttatggttgtgtacctactttgagaagaaaagaaaaatattagaatgaacagataattttacaagtgttgatcacttaccagcaaaccagaaacttcagagattttgaaagcaaatctattttctctgctgtgtattaaattcatttatctaaaatgttattgctcctggcttagaatcatcttgtgcaaattctttttttgttgtttgtctgtttgcctgttgctcaccatagacataattttcttttcataaaacattctttgtataatcacctcagagattatgaaagtgactttgataaaatttaatggtgttcacaaaataattttcacgtgagtaatttcacagtgcgtgtattgtatgttatttagtgtattttatattttgtttcaattagagaatgctattgaatccagtttttgtttagttactgttcattttactttataaaattgacataattgagtttattaaatttattgggccaatttaagtaaacagttgaacgtttcataagtcatgaggtctttttggcatatacatgaagtaaacaaagacaatactagctatgtaatagaagctacataattagaagtaaatattctttttgaaattggcctgtggtctcaggtgaaaaatggaaaatatctatagtaaaaaaaatgacattaattctgcatatgaagagagcataattgtacccatgccacacaattgactcacaattgaaacaagatgaagagatggacattttagcaaaactaagtgaaaaccttgtaaaattttcagattatgtttctacatttaaacatctactgggggaggcagaggccaattctatgcagtcaaacctggaattgctgacacaggttaagagtatgcaccacaggtatcgaaacctaaaatgccctgaactcttttcatatagattaataaaatatggttttagtcttccttctctatattctggcttagacagaactatcaagccatttcaagtagatttaattctagatctttttttttttttctttttttgagatggactcttgctctgtcacccaagctggtgtgcagtggtgtgatcttggctcgctgcagcctccacctcccaggttcaagcaattctcctgcctcaccctcccaaatagctgagactacaggcacctgccaccaggcccagctaattttttgtatttttagtagggatggggtttcaccatgttagctaggatggtcttgatctcctgacctcatgatccacccacctcagccttccaaagtgctgggaatgcacatgtgagccaccgcgcctgtccttgattttagatcttgacacagcacatcctcaacttattgtctccgaggatagaaaagctgtgtgatggaagaacaaaaccaaacatatgttataacccaaggagattttatttctgccctgctttcctgggctctcagaagtgtagttctgacagacattactggaaggtagaggtgggaaacaagcctaaatgaaaattaggtgtgtgtcaagattgtcttcttaggacctggcaggatcagccttcagttctgggttgatttgggggcaattggatgatatatagagtggttatgctgcatcaggtcctaagaaaacccaccttctgccagtagtaaaatccagtaagattggtattcttttggactatgaattgggtgattttttaaagtaatataaataataggtttgttctgtatattttaatgatctttcacaagagctgtttggccttatttctatgctgaagcagattctgaacgtcttaaaatctgttcattatcagatgctgaaagataaagagcaagtaaatgaatctatttcagtttttgtgggtaatttagccagtaaatttaatcttatttctttaatctttaagttttactactgaaggccagaatagatttttttctcttaaatttttggcaagtataaaagcacattcagaatgtcactttcatagatactatgaatatcaattgtcaagtgtgttgatttctaagataaaatatttgagaattaatattacccaacttgtccaataaaatgtttttaagttgcctatttttaaaaaaatctatcaattttgaattgcatacctagctaaatttttttaagattgaggataatatgtaaaataatttatacaagtaatataaactaagtttacttaaattatttacttatttaagaaatctaattacattttaaataaattgctgttacctgtta

SEQ ID NO: 198 - protein, 427 aa, Homo sapiens
MGVLTFRDVAVEFSPEEWECLDSAQQRLYRDVMLENYGNLVSLGLAIFKPDLMTCLEQRKEPWKVKRQEAVAKHPAGSFHFTAEILPDHDIKDSFQKVILRKYGSCDLNNLHLKKDYQSVGNCKGQKSSYNGLHQCLSATHSKTCQCNKCGRGFQLCSIFTEHKDIFSREKCHKCEECGKDCRLFSDFTRHKKIHTVERCYKCEECGKAFKKFSNLTEHKRVHTGEKPYKCEGCGKTFTCSSTLVKHKRNHTGDRPYKCEECGKAFKCFSDLTNHKRIHTGEKPYKCEECNKAYRWFSDLAKHKIIHTGDKPYTCNECGKAFKWFSALSKHKRIHTGEKPYICEECGKAFTRSSTLFNHKRIHMEERPYKCEECSKTFKCFSDLTNHKRIHTGEKPYKCEECGKASSWFSHLIRHKRIHTREKLHKC

SEQ ID NO: 199 - DNA, 3900 bp, Homo sapiens
gcagcggccgcctgctgctctttgtggcagtcgcagtccttttgtgggagtccggtctgtccacttgccggtccctcagaccgtcggcggtctctgtccgcttcgggacctgtccgctggtcgctccgcgtccgatggctcctggccgcggaaccttaggcctggccctggtctccgagcgcgggttcgccgggaggagcgtgtggcgggggtgtgccggggcgtgagtgcgccgagcatggggctgagcctggtgtggggagtgggtatctgcggagccggcctgaaccccacctcagccgggcgcggggagggggctccgtgcgtgtgatcgtgcagctgtgagcgcgtggccgccccgcggggctccgctgcaggcccctcagccccaggagcagtactcgctcttcagggcctgccctggatcctggaggctacacagctgcccactcctcctggggaggctgccgtggaggccatggagatccctgccccggagcccgagaagacagctctttcctctcaggatcctgctctttccctgaaagagaatctcgaggatatatcgggttggggtcttcccgaagccaggtccaaggaatcggtgagtttcaaggatgtggctgtggacttcacccaggaggagtggggtcaactagactcccctcagagggccttgtaccgggatgtgatgttggagaactaccagaaccttcttgccctaggacctccactgcacaagccagatgtgatctctcatctggaacgaggcgaggagccatggagcatgcagagggaagtccccagagggccctgtccagaatgggagctgaaggcggtgccctctcaacagcagggcatttgcaaagaagaaccggcccaggagcccatcatggagcggcccctcggcggggcgcaggcgtgggggcgccaggcaggtgctctgcagaggagtcaggctgcgccctgggcgcccgcacctgccatggtctgggacgtccctgtagaggaattccccctcaggtgtcccctcttcgcccagcaacgcgttcccgaggggggacccttgctggacacacgcaagaacgtccaggccactgagggcagaaccaaggcccccgcgagactgtgtgcaggggaaaacgcctccacgccaagtgagccagaaaagttcccccaggtgcgccggcagcgcggggcgggcgccggggagggcgagttcgtgtgcggcgagtgcgggaaggcgttccgccagagctcctccctcacgctgcaccggcgctggcacagccgggagaaggcttacaagtgcgatgaatgcggcaaggccttcacctggagcaccaaccttctggagcaccggcgcatccacaccggcgagaagcccttcttctgcggcgagtgcgggaaggccttcagctgccactcgtccctcaacgtgcaccagcgcatccacacgggcgagcggccctacaagtgcagcgcctgcgagaaggccttcagctgcagctcgctgctcagcatgcacctgcgggtgcacaccggcgagaagccctaccggtgcggcgagtgcggcaaggccttcaaccagcgtacacacctcacacgccaccaccgcatccacacgggcgagaagccctaccagtgcggctcctgcggcaaggccttcacctgccactcatccctcaccgtgcatgagaagatccacagcggggacaagccgttcaagtgcagcgactgcgagaaggccttcaacagccgctcgcgcctcaccctccaccagaggacgcacacgggcgagaagcccttcaagtgcgccgactgcgggaagggcttcagctgccacgcgtacctgctcgtgcaccggcgcatccacagcggcgagaagcccttcaagtgcaacgagtgcggcaaagccttcagctcccacgcctacctcatcgtgcaccggcgcatccacacaggcgagaagcccttcgactgcagccagtgttggaaggccttcagctgccactcgtccctcatcgtgcaccagcgcatccacaccggtgagaagccctacaagtgcagcgagtgcggcagagccttcagccagaaccactgtctcattaaacatcagaaaatccactccggggagaagtcgtttaagtgtgagaaatgtggggagatgttcaactggagctcgcacctcactgagcaccagaggctgcacagcgaggggaagcccttggccatccagttcaacaaacacctgctcagcacatactacgtgcctggcagcctgctgggtgcaggggatgctggactgagggacgtggatcccatcgacgcgctggatgtggcaaagctcttgtgcgtggttccccccagagctggcaggaatttctccctggggagcaaacctcgaaactaacatgatgtgctttggtgtcagtagctgctttctgagctactcaacaaggaaagcaccctggtcctccctggctcctagatccagaccaccttcctccaggtgtgggagccttgccttatcacccccatcaggtctgcatgccagggtgcctcctctagttaaagtcagtcacctccccagaagggccacactccaggaggagtgttgagagtcatttgaggtagtcttgccacctgttttccttgatgggcctggaagttgttgacaaggggaaagatctttcttgccaataaaaagaagggatatcgttgggtgccatggctcacacctgtaatcttaacactgtgggaggccaaggcaaggggatcacttgagcccaggagtctaggaccagcctggacaacatggtgagacctcgtctctacaaaaaatgcaaaaattagccagatgtggcggcatgtccctgtggtcccagctactcaggaggctgaggtgggaggatcatttgagcctaggaggtcaaggctgcagtgagccatgattcacagcactgcactgcagcctgggtgacaaagcaagaccctgtgtgaaattaaaaggaggtatatcaactgttgtatcctcggacgggctcctgacacggctttaatcaggagtttcctccataaactattattttcagaataataataaaacaagaattatgactagcatcactttccagtgaacattattatattgctagagaggagaataatcttgggtggtgggcatttggaaaaagtgaatttcctggacttaactcatgtaaatagctctactgcagagctgtgtgtttagtgacagtgcagtcaggggcattcccacagctgtcacagcacggcccagcatcattgtagccagatcctaacatgccaacatcacctcttgccatttagcccctagtgagaaattgggagctaccaggcaggtgcccagtgcattcagggaagatgggcacaacatcaggatgggtgtgtctggaagctcctcttcactgaccagggctgggcagggccaccctgggctggtgaggctgccctgcagggcttctcactatgtagcaccagtcaccagcccaggtcacagaagaagcccctcccagcacccactggagaggggaagctgaagcccagggagacgggctccatggtggtcccacatggagctgttttgcaaaccctggaaaaggcggctctccctgtcccaacactcttcagagacaggaagacagagttaatcttgaatgaatgttatttctacttagtcctaagcaagaataagctgccctcttggtgatcatactttatacggagtgctatcgtttatgaaatgctttcagtatgctttttaaattatgcaggcaaaataaccacacttcagaaaatgtggacttctgaaaaataaaatccccataattcttaataaaactgccttttgcactttga

SEQ ID NO: 200 - protein, 644 aa, Homo sapiens
MEIPAPEPEKTALSSQDPALSLKENLEDISGWGLPEARSKESVSFKDVAVDFTQEEWGQLDSPQRALYRDVMLENYQNLLALGPPLHKPDVISHLERGEEPWSMQREVPRGPCPEWELKAVPSQQQGICKEEPAQEPIMERPLGGAQAWGRQAGALQRSQAAPWAPAPAMVWDVPVEEFPLRCPLFAQQRVPEGGPLLDTRKNVQATEGRTKAPARLCAGENASTPSEPEKFPQVRRQRGAGAGEGEFVCGECGKAFRQSSSLTLHRRWHSREKAYKCDECGKAFTWSTNLLEHRRIHTGEKPFFCGECGKAFSCHSSLNVHQRIHTGERPYKCSACEKAFSCSSLLSMHLRVHTGEKPYRCGECGKAFNQRTHLTRHHRIHTGEKPYQCGSCGKAFTCHSSLTVHEKIHSGDKPFKCSDCEKAFNSRSRLTLHQRTHTGEKPFKCADCGKGFSCHAYLLVHRRIHSGEKPFKCNECGKAFSSHAYLIVHRRIHTGEKPFDCSQCWKAFSCHSSLIVHQRIHTGEKPYKCSECGRAFSQNHCLIKHQKIHSGEKSFKCEKCGEMFNWSSHLTEHQRLHSEGKPLAIQFNKHLLSTYYVPGSLLGAGDAGLRDVDPIDALDVAKLLCVVPPRAGRNFSLGSKPRN

SEQ ID NO: 201 - DNA, 3846 bp, Homo sapiens
gtgcggccgcgctgcctccaggaagcctcacgggccttcgtctgccgggccgcggcgccggctcccaggatgcagtgtggaccggccgggcgctgacggaggcggcgcgactgcgggcggcgcggcgcaggggcagccagcgaggagcggcggcagaggaaaggccaggcaggcgccgcctgcggagagcaccgggcggccgggcctgcgtggtgccgcgcgcggcggcggcgacgacgacttcctccgggccgggcgggacagcgcagggccatggccgaggcggtcgcggctccgatttctccgtggacgatggcagccacgattcaggccatggagaggaagattgaatcgcaggctgctcgcctgctttccctagaaggtcgaaccgggatggccgagaagaagctggctgattgcgagaagacagccgtggagttcgggaaccagctggagggcaagtgggccgtgctggggaccctgctgcaggagtacgggctgctgcagaggcggctggagaacgtggagaacctgctgcgcaacaggaacttctggatcctgcggctgcccccgggcagcaagggggagtcccctaaggtgcccgtgacctttgatgatgtggccgtgtatttctccgagcaggagtggggcaagctggaggactggcagaaggagctctacaagcacgtgatgaggggcaactacgagacgctggtctccctggactacgccatctccaagcccgaggtcctctcccagattgaacaagggaaggagccctgcaactggcgccgccctggccccaagattccagatgttcctgtggaccccagtccaggctcggggcccccagttcccgccccagacctcttgatgcagatcaagcaggagggtgagctccagctccaggagcagcaggccctgggcgtggaggcgtgggcagccgggcagccagatattggggaggagccctggggcctcagccagctggattccggagcaggagacatctccacggatgccacctctggtgtccattccaacttttccaccaccatcccgcccacctcctggcaaacggatctccctccccaccatccctcttcagcatgctcggacgggaccctgaagctcaacacagcagcctccacggaagcagatgtaaaaattgtaataaaaacagaagtccaggaagaggaggtggtggccacacccgtacatcctactgacctagaggctcacgggaccctgtttggaccaggccaagccacacggttcttccctagtcctgcccaggaaggagcctgggaaagccagggcagctccttccccagccaggaccctgtgctggggctgcgagagcccgcccggcctgagagggacatgggtgagctcagtcctgctgtggcccaggaggagacccctcctggggactggctcttcggaggggtccggtggggctggaatttccggtgtaaaccgccagtgggcctgaacccgaggacggggcccgaggggcttccttactcctccccggacaacggagaggccatcttggaccccagccaggccccaaggccattcaacgaaccctgtaaataccctggccggaccaaaggctttggccacaagccagggctgaagaagcaccccgcggcgccccccgggggccggcccttcacctgcgccacgtgtgggaagagcttccagctgcaagtcagcctgagcgcgcaccagcgcagctgtggggcgcccgacgggtcgggcccgggcacaggcggtggcggcagcggcagtggcggcggcggtggcggcagcggtgggggcagcgcacgggatggcagcgcccttcggtgtggggagtgcggccgttgcttcacgcgccccgcgcacctcatccgccatcgcatgctgcacaccggcgagcggcccttcccctgcaccgagtgtgagaagcgcttcaccgaacgctccaagctcatcgaccactaccgaacgcacacgggcgtgcggcccttcacctgcaccgtctgcggcaaaagcttcatccgcaaggaccacctccgcaagcaccagcgcaaccatgcagcgggcgccaagaccccggcccgaggccagccactcccgacgccgcccgcacctcctgatcccttcaagagccccgcctccaaaggacctttggcctccacagaccttgtgaccgactggacttgtggcctcagcgtcctgggacccaccgatggcggggacatgtgagcgcctccagccccatagcccctgccggccgcacgtgtaaaaagccccgtgtgcaggcagcagggcggcgtggaagcttcaggcagacgcgggacggggagaaccaaatgtccaagttgctgaactgatgatcactggagaaagagaaactatccaccaggacagctgccacctctaaaccaagtagaattctctgtgaaatgggagcgccgtagaattttaagtaatttaattgcaaacctgttttgttttttgttttttgtttttttttaattcttgaggaaaaagctggaaaatagtaatagggctatttaaattttgtaggtacttttggttttcagggcgtgcatttctgtcactatctcactgagtctgatagtgtgttggaaggttggccagttggggacccctggcccactgactcctggggatggggtcctgtgtgtgcccctgctctgcccagttgggctgagtgggcctagcgcaccaagcccctgggcagtgagggccattgggtcccttggagcacacctcagtgcagcaggaaggacccctccgggagtagcggttgcatttcccagcttgcctctcctgaaaaggccccccaaaagtgctggccccaacttttctctattttgggccatctgtggtacccgtcccaagggcacttggtggtgtcccctagtgtgtgactccctggcctcataaggacgagttgtctgaaatcccagcgttaggtctggggagatggagaagctgaaactggggagctgcaccacaaacgtctagctctcagcagagctgggagcaaagcctggccgcccaccccaacctggggctgcctcccactccgtgagatgcttctgtctcctgttcactttgtgtggtagtttcttattttcaaaatgcatctcatttgatcattactgtgaccttgggaagcagcaggacagggatttctttttagaggtgcaaactgctcagaggggacacacctcagcctctcactgtgggtacacgtggcgtgccatgagtggggaagagcaacaggcgagatgcctcattctactggaacatcactgtgggtgaacagagatttccaggttttccctcttaaaatatttgtcccacaccgacaagagtccagtcaccaggcctcaaaggaacttctgcttgtagcagccgcctcccctgtgccccagcctccttaatgtgtgcactctcagagggcacagctcgcgaggctgggtttgggggccaagtggcttgttcattccagcatctaacatcataaaggtgggcccagatttcttgattcgaccacagtgctgttcctaccacacaaatatccattcctgttttgttgaagcagccactggtcctcttgtttcccctgcagacggagggacctggcagtgcccattcattcagccccctcatgcatacttttattaggcgatagactagttaagaaaattgtttctatgtactgtatattttgtacctgtttacacttctaatattgatataactgatattttgaaaaataagagaaaacatcctgttaaaataaaacctaaccagcaccaa

SEQ ID NO: 202 - protein, 660 aa, Homo sapiens
MAEAVAAPISPWTMAATIQAMERKIESQAARLLSLEGRTGMAEKKLADCEKTAVEFGNQLEGKWAVLGTLLQEYGLLQRRLENVENLLRNRNFWILRLPPGSKGESPKVPVTFDDVAVYFSEQEWGKLEDWQKELYKHVMRGNYETLVSLDYAISKPEVLSQIEQGKEPCNWRRPGPKIPDVPVDPSPGSGPPVPAPDLLMQIKQEGELQLQEQQALGVEAWAAGQPDIGEEPWGLSQLDSGAGDISTDATSGVHSNFSTTIPPTSWQTDLPPHHPSSACSDGTLKLNTAASTEADVKIVIKTEVQEEEVVATPVHPTDLEAHGTLFGPGQATRFFPSPAQEGAWESQGSSFPSQDPVLGLREPARPERDMGELSPAVAQEETPPGDWLFGGVRWGWNFRCKPPVGLNPRTGPEGLPYSSPDNGEAILDPSQAPRPFNEPCKYPGRTKGFGHKPGLKKHPAAPPGGRPFTCATCGKSFQLQVSLSAHQRSCGAPDGSGPGTGGGGSGSGGGGGGSGGGSARDGSALRCGECGRCFTRPAHLIRHRMLHTGERPFPCTECEKRFTERSKLIDHYRTHTGVRPFTCTVCGKSFIRKDHLRKHQRNHAAGAKTPARGQPLPTPPAPPDPFKSPASKGPLASTDLVTDWTCGLSVLGPTDGGDM

SEQ ID NO: 203 - DNA, 4207 bp, Homo sapiens
acttctggcggcgccctcatggttgcgttagcatggctacctagggatctgttcactgatttagagggtcccagagctctgggtcgggactgaggtgaaagagcggaaaaacgcgagaagcggtgttccttctacacagaggctagagtgcggatcggctgagtcggctgcaggcgcccctgcctccgtcagcgtccaggtgaccgccgttcccgccccgctcttccctgggtggactggaggaggccgcgccgatgaacctgaccgaggattgtatggtctttgaggatgtggccatatatttctcccaagaggaatgggggatccttaatgatgctcagagacacctgcacagcaatgtgatgttggagaactttgcgcttttgtcatcagtaggttgttggcatggagccaaggatgaggaggtaccttccaagcagtgtgtttctgtaagagtgttacaggtcacaattccaaagccagctttgtccaccctgaaggcccagccctgcaagatgtgtagctcaattctgaaggacattctgcacctggctgagcacgatggaacacaccctgagcaagggctgtacacatgtgcagcagagcatgacctgcaccaaaaggagcagattagagagaagctcaccagaagtgatgagtggaggccttcatttgtgaaccacagtgctcacgtgggagagaggaacttcacatgcacgcagggtggcaaggattttactgccagctcagaccttctccagcaacaggtcttaaacagtgggtggaagctgtacagggatacccaggatggggaagcctttcaaggtgaacagaatgatttcaactccagccaaggtgggaaagacttttgccaccaacatgggctgtttgagcaccaaaaaacccataatggggagaggccttatgagttcagtgaatgtggggaattgtttaggtacaactccaaccttattaaatatcagcaaaatcatgctggagaaaggccttatgagggcactgaatatggaaagacctttattagaaagtccaacctagttcagcaccagaaaattcacagtgaaggctttctttcaaaaaggtctgaccccattgaacatcaggagattctcagtagaccaacaccttatgaatgcacccagtgtgggaaggcctttcttacacaggctcatctggttggtcaccagaaaacccatactggagaacagccctatgaatgcaacaagtgtgggaagttttttatgtataactccaaactcatcagacatcagaaagttcacactggggagaggcgttacgagtgcagtgaatgtgggaaattgtttatggacagcttcacactcggtagacatcagagagttcatactggagaaaggccttttgaatgcagcatatgtggaaaattctttagtcaccgctccacactcaatatgcaccagagagttcatgctggcaaaaggctttataagtgtagcgaatgtgggaaagcctttagcctcaaacataatgttgttcagcatctgaaaattcatactggagaacggccttatgagtgcactgaatgtgagaaggcctttgttagaaagtcccacctagttcagcaccagaaaatccacactgatgcattttcaaaaaggtctgacctcattcaacacaagaggattgacattaggccaaggccttatacatgcagtgaatgtgggaaggccttccttacacaggctcatctggttggtcaccagaaaatccatactggagaacggccttatgaatgcactcaatgtgcgaaggcctttgttagaaagtcccacctagttcagcatgagaaaatccacactgatgcattttcaaaaaggtctgacctcattcaacacaagaggattgacctcaggccaaggccttatgtgtgtagtgaatgtgggaaggccttccttacacaggctcatctagatggtcaccagaaaatccagactggagaacggcgttatgaatgcaatgaatgtgggaaattctttttggacagctacaaacttgttattcatcagagaattcacactggagaaaagccttataaatgcagcaaatgtgggaaattctttagatatcgctgtacactgagtagacatcagaaagttcacactggagaaagaccttatgagtgtagtgaatgtgggaaattttttagagatagctacaaactcattattcatcagagagttcatactggagaaaagccttatgaatgcagcaactgtgggaagtttcttagataccgctctacattcattaaacatcataaagtttgcactggggagaagcctcatgagtgcagtaaatgtagggaattgtttaggactaaatcgagccttattatacatcagcagtctcacactggagaaagtccttttaagttaagggaatgtgggaaagacttcaacaaatgtaatactggtcagcgccaaaaaactcacactggagaaaggtcttatgagtgtggtgaatccagcaaagtgtttaaatacaactccagcctcattaaacatcagataattcatactggaaaaaggccttagtggagtgaatgcaggaaagtcaccaaaactgtcacctcattcagcaccaaaaggttcacatcggaccaagaacctattaatatatgtaaatctaatgttgaaagagttcagatggaaatctgcgaggatttcctgctgggaactacattaaaaacatttatgtccaggcgtggtggctcacgcctgtaatcccagcactttgggaggcagaggtgggtggatcacctgaggtcaggagtttgagaccagccgggccaacatggtgaagccccatctctactaaaaatacaaaaattagctgggcatggtggcaggtgcctgtaatcccagctattcaggggactgaggcagggagcatcacttgaacctgggaggcggaggttgcagtgaactgagattgttccattgcactccagcctgggtgacagggcgagactctgtctcaaaaagaaaaaaattataattgtggcaaattacaggtaacttaaaatctaccatcttaacccatatttaactgtactgttcagtagtgttaagtcattcgcattgttgtcaattaatatccagaagttttttcaacttaatgaaactaaaacattataccctttaaaccaggggtccacaacccccaggctgcaaactggtaccagtctgtggcctgttaggaaccgggccagcatcactacctgagcttcacctcctgtcagatgagcagcattagattctcatagcagcctgagccctattgtgaactgtgcctgtgagggatctaggttgtgtgctccttatgagaatctaactaatacctgatgatctgaggtgggacagttttattctgaaactgtctgccccctcctctgtccctgatgcgtggaaaaattggcttccatgaaaccagtccctggtgccaaagaggttggggaccgctgctttaaactactcctcttcctcattccctacgccaaccagcccctgacaatactactgtatgaattttactataaatatctcatatgaggaaacttaagttttagtcttttgtgacttattttgaggcttatttccctaaatgtcttcaaggtttatccatgttgtagcatagcttatgattttcatcttttttaaaggccgaataaaatcccattgtagtcatgtgtcgcctaacaagaggactgtgttctgagtaatcatcttaaggtgattttgtcattgtgtgaacaaagagtgtacttacacaaacctgaagggcacagcctattacgcacctaggctatatgatatggtccattgcgcctcagatataaaccttaacagcatgttacagtattgaatattgtaggtaattgaaacacaatgataagtaaatgtgtatctaaacatatctaagtttccaaaaggtactgtaaaaatgtatgaaaaatggtaaaaactttatagggcactaacatgaacgaagcttgcgggacccctctggttgagtcagggagtgagttgtgagtgaatgtgaagctctaggacattactgtaccctattgtagatgttataaacattgtacacttaggctactctaaattaattttttctttagtaataaattaaccttagtctactgtaa

SEQ ID NO: 204 - protein, 778 aa, Homo sapiens
MNLTEDCMVFEDVAIYFSQEEWGILNDAQRHLHSNVMLENFALLSSVGCWHGAKDEEVPSKQCVSVRVLQVTIPKPALSTLKAQPCKMCSSILKDILHLAEHDGTHPEQGLYTCAAEHDLHQKEQIREKLTRSDEWRPSFVNHSAHVGERNFTCTQGGKDFTASSDLLQQQVLNSGWKLYRDTQDGEAFQGEQNDFNSSQGGKDFCHQHGLFEHQKTHNGERPYEFSECGELFRYNSNLIKYQQNHAGERPYEGTEYGKTFIRKSNLVQHQKIHSEGFLSKRSDPIEHQEILSRPTPYECTQCGKAFLTQAHLVGHQKTHTGEQPYECNKCGKFFMYNSKLIRHQKVHTGERRYECSECGKLFMDSFTLGRHQRVHTGERPFECSICGKFFSHRSTLNMHQRVHAGKRLYKCSECGKAFSLKHNVVQHLKIHTGERPYECTECEKAFVRKSHLVQHQKIHTDAFSKRSDLIQHKRIDIRPRPYTCSECGKAFLTQAHLVGHQKIHTGERPYECTQCAKAFVRKSHLVQHEKIHTDAFSKRSDLIQHKRIDLRPRPYVCSECGKAFLTQAHLDGHQKIQTGERRYECNECGKFFLDSYKLVIHQRIHTGEKPYKCSKCGKFFRYRCTLSRHQKVHTGERPYECSECGKFFRDSYKLIIHQRVHTGEKPYECSNCGKFLRYRSTFIKHHKVCTGEKPHECSKCRELFRTKSSLIIHQQSHTGESPFKLRECGKDFNKCNTGQRQKTHTGERSYECGESSKVFKYNSSLIKHQIIHTGKRP

SEQ ID NO: 205 - DNA, 3983 bp, Homo sapiens
agaccaggaagcggatagcgtggagtgacggtgccaccgcggcgcagtattgcccgggctgtgagtgcagtctcatgatcttgggtcactgcaacctctgtttcctgggttcaagtgattcttgtgcctcagcatcccacgtagctgagattacaggattgacttctaaagactcttggtacgtgaggaagaaacccggaagaggaagaggagagcaaaggagtcagggatggctttttctcagggtctattgacattcagggatgtggccatagaattctctcaggaggagtggaaatgcctggaccctgctcagaggactctatacagggacgtgatgctggagaattataggaacctggtctccctggatatctcttccaaatgcacgatgaaggagttcttgtcaacagcgcaaggcaacagagaagtgttccatgcagggacattgcaaatacatgaaagtcatcacaatggagatttttgctaccaggatgttgataaagatattcatgactatgaatttcaatggcaagaagatgaaagaaatggccatgaagcacccatgacaaaaatcaaaaagttgacaggtattacagaacgatatgatcaaagtcatgctagaaacaagcctattaaagatcagcttggatcaagctttcattcgcatctgcctgaaatgcacatatttcagaccgaagagaaaattgataatcaagttgtgaagtctgtccacgatgcttccttggtttcaacagcccaaagaatttcttgtaggcccaaaacccatatatctaataaccatgggaataatttctggaattcttcattactcacacaaaaacaggaagtacacatgagagaaaaatctttccaatgtaatgagagtggcaaagcctttaattacagctcactcttaaggaaacatcagataatccatttagcagacaaatataaatgtgatgtatgtggcaagctctttaatcagaagcgaaacctagcatgccatcgtagatgtcacactggtgagaatccttacaagtgtaatgagtgtggcaagaccttcagtcagacgtcatcccttacatgccatcgtagacttcatactggagagaaaccttacaaatgtgaagaatgtgacaaagctttccatttcaaatcaatacttgaaagacataggataattcatactgaagagaaaccatataagtgtaatgagtgtggcaagacctttaggcagaagtcaatccttacacgccatcatcgacttcatactggagagaaaccttacaagtgtaatgagtgtggcaagacctttagtcacaagtcatcccttacatgccatcatagacttcatactggagagaaaccctacaaatgtaatgagtgtggcaagacctttagtcacaagtcatcccttacatgccatcgtagacttcatactggagagaaaccttacaaatgtgaagaatgtgacaaagcttacagtttcagatcaaattttgaaatacatcggaaaattcatactgaagacaatgcttacaagtgtaatgagtgtggaaagacctttagccggacatcatcccttacatgccatcgtagacgtcatactggagagcaaccttacaaatgtgaagaatgtgacaaagctttccgtttcaaatcaaaccttgaaagacataggagaattcatactggagagaaaccatacaagtgtaatgagtgtggcaagacctttagtcggaagtcatacctcacatgccatcatagacttcatactggagagaaagcttacaagtgtaatgagtgcggcaagacctttagttggaagtcatcccttacctgccatcgtagacttcattctggagagaaaccttacaagtgtaaggagtgtggcaagaccttcaatcagcagttaacccttaaacgccatcgtagacttcatagtggagagaacccttacaaatgtgaagatagtgacaaagcttacagtttcaaatcaaaccttgaaatacatcagaaaattcatactgaagagaatccttacaagtgtaatgagtgtggcaagaccttcagtcggacgtcatcccttacatgccatcgtagacttcataccggagagaaaccttacaaatgtgaagaatgtgacaaagctttccgtgtgaaatcaaaccttgaaggacataggagaattcatactggagagaaaccttacaagtgtaatgagtgtggcaagacctttagtcggaagtcatattttatatgccatcatagacttcatactggagagaaaccttataagtgtaatgagtgtggcaagaactttagtcagaagtcatcccttatatgccaccatagacttcatactggagagaaaccttacaagtgtaatgagtgtggcaagacctttagtcagaagtcaaaccttacatgccatcgtagacttcatactggagaaaaacaagtgtaatgaatgtggtgaggtttttaatcaacaagcacaccttgcaggtcatcatagaattcatactggggagaaaccttagaaatgtgaagcatgtgataaagtttacagtggcaaatcaagcctcagaagacaggagaattcatactggagagaaagcttataaatgtgaagaatgtcacaaagtttacagtcgcacatcaaaccgtgaaagacaggagaattcatactggagagaaaccataaaaatgtaagagtttgtgacaaggcttttgggcatgattcgcacctggcacaacatgctagaattcacactggagagaaaccttaccagtgtaatgagtgtggcaaagcctttagtaggcagtcaacacttgtttaccgtcaggcaatccatggtgtagggaaactttactaaggtaatgattgtcacaaagtcttcagtaatgctacaaccattgtgaatcactggagaatccataaggaagagagatcatactagggtaataaatgtggcagatttttcagacattgttcataccttgcagttcatcggtgaactcaacgctggagagaaaccttacaaatgtcatgactgtggcaaggtcttcagtcaagcttcatcctatgcaaaacataggagaattcatacaggagagaaacctcacatgtgtgatgatagtggcaaagccttcacttcacacctcatgagacatcagagaatgcatactggacagaaatcttacaaatgtcatcaatgtgccaaggtcttcagtctgagttcactccttgcagaatatgagaaaattcattttggaggtagttggtccatatgcaatgagtagagcaaaccatcaagcattaattgacattagggtcaattcagcattgacttgagtttgtattgacttaacattgagttcaagcattaattgacattagtgtttatgttaagaggattgggccaggcacatcagcttacacctgtaatctgagcgctttgggaggccaaggtgggtagatcacttgaggtcaggagtttgagatcagcctggccaacagacgtgagccattttcccagcctgttttttgtttctttaaaaaaactgatagggatttttatggatatcatgttgaatctaaatcacattgggttattatataatcatttcacaatattaatttttccaagctatcaatatgggttgtagctcaatgtttttaatcattttgatcaatgtttgtagatttcaaggtacaaacttctgacctttgtacgtttatttctaagtatttctttaagttctccagcaaatggaagtgttttaaaattttcttttaaaattgtttattgttaaagtatggaaattcaactaatttttggtgctgatactgtattgtgcaaatccactgactatgttacttagttccagtagtattttggttggctctttgtgattttctacacagaagattatgtcatctacaaacaaatataattttacttcttactttctga

SEQ ID NO: 206 - protein, 746 aa, Homo sapiens
MAFSQGLLTFRDVAIEFSQEEWKCLDPAQRTLYRDVMLENYRNLVSLDISSKCTMKEFLSTAQGNREVFHAGTLQIHESHHNGDFCYQDVDKDIHDYEFQWQEDERNGHEAPMTKIKKLTGITERYDQSHARNKPIKDQLGSSFHSHLPEMHIFQTEEKIDNQVVKSVHDASLVSTAQRISCRPKTHISNNHGNNFWNSSLLTQKQEVHMREKSFQCNESGKAFNYSSLLRKHQIIHLADKYKCDVCGKLFNQKRNLACHRRCHTGENPYKCNECGKTFSQTSSLTCHRRLHTGEKPYKCEECDKAFHFKSILERHRIIHTEEKPYKCNECGKTFRQKSILTRHHRLHTGEKPYKCNECGKTFSHKSSLTCHHRLHTGEKPYKCNECGKTFSHKSSLTCHRRLHTGEKPYKCEECDKAYSFRSNFEIHRKIHTEDNAYKCNECGKTFSRTSSLTCHRRRHTGEQPYKCEECDKAFRFKSNLERHRRIHTGEKPYKCNECGKTFSRKSYLTCHHRLHTGEKAYKCNECGKTFSWKSSLTCHRRLHSGEKPYKCKECGKTFNQQLTLKRHRRLHSGENPYKCEDSDKAYSFKSNLEIHQKIHTEENPYKCNECGKTFSRTSSLTCHRRLHTGEKPYKCEECDKAFRVKSNLEGHRRIHTGEKPYKCNECGKTFSRKSYFICHHRLHTGEKPYKCNECGKNFSQKSSLICHHRLHTGEKPYKCNECGKTFSQKSNLTCHRRLHTGEKQV

SEQ ID NO: 207 - DNA, 4572 bp, Homo sapiens
agacccggaagcggacggcgtggagtgactatcccaccgccgcgggattgacttctaaagactcttggtatgtgaggaagaaacctggaagaggaagaggaaagcaaaggagtcagggatggctcttcctcagggtctattgacattcagggatgtggccatagaattctctcaggaggagtggaaatgcctggaccctgctcagaggactctatacagggacgtgatgctggagaattataggaacctggtctccctggatatctcttccaaatgcatgatgaaggagttctcgtcaacagcacaaggcaatagagaagtgttccatgcagggacatctcaaagacatgaaagtcatcacaatggagatttttgtttccaggatattgataaagatattcatgacattgagtttcagtggcaagaagatgaaagaaatggccatgaagcactcatgacaaaaatcaaaaagttgacaggtagtacagagcgatatgatcaaaattatgctggaaacaagcctgttaaatatcagcttggattcagctttcattcgcatctgcctgaactgcacatatttcacactgaagagaaaattgataatcaagttgtgaagtctatccacgatgcttccttggtttcaacagcccaaagaatttcttgtaggcctgaaacccatatttctaatgactatgggaataatttcctgaattcttcattattcacacaaaaacaggaagtacatatgagggaaaaatctttccaatgcaatgacagtggcaaagcctataattgtagctcactcttaaggaaacatcagttaatccatttaggagagaaacaatataaatgcgatatatgtggcaaggtctttaattcgaagcgatacgttgcacgccatcgtagatgtcacactggtgagaaaccttacaagtgtaatgagtgtggcaagaccttcagtcagacatattacctaacatgccatcgtagacttcatactggagagaaaccttacaaatgtgaagaatgtgacaaagctttccatttcaaatcaaagcttcaaatacataggagaattcatactggagagaaaccgtacaagtgtaatgagtgtggcaagacctttagtcagaagtcgtaccttacatgccatcgtaggcttcatactggagagaaaccttacaagtgtaatgagtgtggcaagacctttagtcggaagtcacattttacatgccatcatagagttcatactggagagaaaccttacaagtgtaatgagtgtagcaagacctttagtcacaagtcatctcttacataccatcgtagacttcatactgaagagaaaccttacaagtgtaatgagtgtggcaagaccttcaatcagcagttaacccttaacatttgtagacttcatagtggagagaaaccttacaaatgtgaagaatgtgacaaagcctacagtttcaaatcaaaccttgaaatacatcagaaaattcatactgaagagaatccttacaagtgtaatgagtgtggcaagaccttcagccggacgtcatcccttacataccatcatagacttcatactggacagaaaccttacaaatgtgaagattgtgatgaagctttcagtttcaaatcaaaccttgaaagacataggagaatttatactggagagaaactacacgtgtaatgagtgtggtaagaccttcaatcaggagttaacccttacatgccatcgtaggcttcatagtggagagaaaccttacaaatatgaagaacttgacaaagcttacaatttcaaatcaaaccttgaaatacatcagaaaattcgtactgaagagaatcttacaagtgtaatgagtgtggcaagaccttgagtcatacgtcatcttttgtgtaccatcataaacttcatagtggagagaccttacaaatgtgaagaatgtgaagaagctttctgtttcaaatccaaccttgaaagacataggagaattcacactggtgagaaaccttacaggtgtaatgagtgtggcaagaccttcagccagacctcatcccttacatgccattgtagacttcgtactggagagaaaccttacaaatgtgaagaatttgagttttccatttcaaatcaaaccttgaaagacaaaggagaattcatactggagagaaaccatacaagtgtaatgagtgtggcaagacctttagtcagaactcataccttacacgccatcgtagacttcatactggaggataccttacaaatgtaatgagtgtggcaagacctttagtcagaactcataccttacatgccatcatagacttcatactggagagataccttaaaagtgtagtgagtgtggcaagacctttagtctgaagtcataccttacgcaccatcgtagacttcatactggagaggtaccttacaaggataatgagtgtagaaaaacctttcatgggcagtcagcattttacaaatgtaatgattgtcaccaagtcttgagtaatgctacaactattgcaaatcattggagaatccataatgaagagagatcctacaagtgtgataaatgcagaataaatgcagaaaatttttcagacatccttcatacctttgcagttcatgggtgaagtcgtattagaaaccttacaaatgtgaagaatgtgatgaagctttcagattcaaatcaaaccttgatagtcatagaattcatactagagagaaaccttagcagtgtaatgaacgtggcaaggttttaaatcaaaaagcaaagcttgcacatcatcatagaattcatactggagataaacgttacaaatgtgaagcatgtgacaaagtttacagtcgcaaatcaagcctccaaagacaggagaattcatactggagagaaagcttacatatgtgaagaatgtcaccaagttttcagtcacactcaaaccttgaaagacacaggagaattcctactggagagatagcataaaaatgtaagagtttgtgacaaggctttcaggcataattcgcacctggcacaacatcctagaattcacattggagagaaagcttacaagtataatgaatgtgacaggtctttagtgggcagtcaacacttgtttaccatcaggcaatccatggtgtagggaaactttacttatgtaatgattgtcacaaagtcttcagttacactacaaccattgcgaatcattggagaatccataatgaagagagatcatactagtttaataaatttggcaaatttttcagacattgttcataacttgcagttcatcggcgaactcgtactggagagaaaccttacaaatgtcatgattgtgacaaggtctcagtcaagcttcattctatgcaaaacataggagaattcatacaggagagaaacctcacaagtgtgatgattgcggcaaagcctttaattcacattcacacctcactagacatcagagaatgcatactggacagaaatcttataaatgtcatcagtgtgccaaagtcttcagtctgagctcactccttgcaggatatcagaaaattcattttggagatagttgttccaaatacaatgtgtatagcaaaccatcaagcattaattgacactagagtcagttcagcattgacttgagtttgacttaacattgagttgaagccttaattgacattaaagtgtttatgttaagaggactgggccaggcacagtggctcacacctgtaatctgagcgctttgggaggccagcaccggtagatcacttgagttcaggagtttgaggtcagcctggccaacagacgtgagccattttcccagcctgttttttgtttctttaacaaaaactgatagggatttttttttttttttttgagatggagtttcactcttgttgcccaggctggactgcaatggagcgatcccagctcactacaacctccgcctcccaggttcaagcaattctcctgcctcagcctccagagtagctaggattacaggcatgagccaccacgcccagctaattttgtatttttagtagagatggggtttctccatgttggttaggctggtcttgaactcccagcctcagatgatccacccacctcggcctcccaaagtgctgggattacaggcgtgagccactgcgcccagccccagtgataaggatttttatgggtaccgtgttgaatctaaatcacattgggttatataatcatttaacaatattaatttttccaaaccataagtatgggttgtagctctatgtttctaatcattttgatcaatgtttgtagatttcaaggtaaaaacctctgacctttttacgtttatttctaagtatttcttactttaagttctccagccaatggaagtgttttaaaattttcttttaaagttgtttgttgttaaaagtatggaaattcaactaatttttggtgctgatactgtattgtgcaaatccactgaatatgttacttagttccagtagtattttggttgactctttgtgattttctgcacagaagatcatgtcgtctacaaacaaatataattttacttctttctttctga

SEQ ID NO: 208 - protein, 523 aa, Homo sapiens
MALPQGLLTFRDVAIEFSQEEWKCLDPAQRTLYRDVMLENYRNLVSLDISSKCMMKEFSSTAQGNREVFHAGTSQRHESHHNGDFCFQDIDKDIHDIEFQWQEDERNGHEALMTKIKKLTGSTERYDQNYAGNKPVKYQLGFSFHSHLPELHIFHTEEKIDNQVVKSIHDASLVSTAQRISCRPETHISNDYGNNFLNSSLFTQKQEVHMREKSFQCNDSGKAYNCSSLLRKHQLIHLGEKQYKCDICGKVFNSKRYVARHRRCHTGEKPYKCNECGKTFSQTYYLTCHRRLHTGEKPYKCEECDKAFHFKSKLQIHRRIHTGEKPYKCNECGKTFSQKSYLTCHRRLHTGEKPYKCNECGKTFSRKSHFTCHHRVHTGEKPYKCNECSKTFSHKSSLTYHRRLHTEEKPYKCNECGKTFNQQLTLNICRLHSGEKPYKCEECDKAYSFKSNLEIHQKIHTEENPYKCNECGKTFSRTSSLTYHHRLHTGQKPYKCEDCDEAFSFKSNLERHRRIYTGEKLHV

SEQ ID NO: 209 - DNA, 6282 bp, Homo sapiens
agacccggaagtggatggcgtggagatatggcgcaactgcggcgcggacacttgacattcagggacgtggccatagaattctctcaggaggagtggaaatgcctggaccctgtgcagaaggctttatacagggatgtgatgttggagaactacaggaacctggtctccctgggaatctgtcttcctgacctgagtattatctccatgatgaagcaaaggacagagccctggactgtggagaatgaaatgaaagtagcaaaaaatccagataggtgggaaggtatcaaagatatcaacacagggaggagctgtgcagtgagaagcaaagcaggaaacaagcctattacaaatcaacttggattaacctttcagttacctctgccagaactggagatatttcaaggtgaagggaagatttatgaatgtaatcaagttcaaaagttcatcagccacagttcttcagtttcgccacttcaaagaatttactctggggtcaaaacccacatatttaataaacataggaatgattttgttgattttccattgctgtcacaagaacagaaagcacacattaggagaaaaccttacgaatgtaatgagcagggcaaagtcttcagagtgtcttcaagccttcctaatcatcaagtaatccacactgcagataaacctaacagatgtcatgaatgtggtaaaaccgtcagggacaagtcaggcctcgcagaacattggagaattcgtacaggagagaaaccttacaaatgtaaagagtgtggcaagctcttcaatcgaattgcataccttgcacgacacgagaaagtgcatactggagagagtccttacaaatgtaatgagtgtggcaaggtcttcagtcgaattacataccttgtacgacatcagaaaattcatactagagagaaacctcataaatgtaacaaatgtggcaaggtttatagtagcagttcatacctagcacaacattggagaattcatacaggagagaaactttacaaatgtaataaatgtggcaaagaatttagtgggcattcaagcctcaccacccatctgttaatccacactggagagaaaccttacaaatgtaaagaatgtgacaaagcttttaggcacaagttctccctgacagttcatcagagaaatcataatggagagaaaccttataaatgtcatgaatgtggcaaagtcttcactcaagtttcacatcttgcacgacatcagaaaattcacactggagagaaaccttacaaatgtaatgagtgtggcaaagtcttcactcagaattcacaccttgcaaatcatcagagaatccacactggagagaaaccttacaaatgccatgtgtgtggtaaggtctttaggcacagttcatggtttgtacagcatcagagaagtgttcatgagagagtccttacaaactgagtttggcaaactctatcataagttctagcagtaatcaacatccgagagtctatactagaaagaaatcatttaaatgtactatatgtggcacaggctgtatcgagacctaccaaatcactagacatcgaaacattcatctttggtgaaaccacacaaatggattgtgtgtgccaaggccaacaagtcaaaatatgttgaacctaatgatatgatgtgtataaagggtgcaaggacacgtggaaatgatctgtaatattcgggttattaaaaatgtaattggctgggcgcagtggctcacacctgtaatcctagcactttgggaggttgaggcaggtggatcacaaggtcaggagtttgagaccagcctggccaatatggtgaaacaccatatctactataaatacaaaaaaattagccaggcgtggtggcacatgcctgcaatcccagctactcgggaggctgaggcaggagaattgcttgaatccaggaggcagaggttgttgcagtgagctgagatcgcgccactgcactccaacctgggtgacagagcgagactccgtctcaaaaaaaaaaaaaaattatttgggtttgaaaggccaggggcagtggttcatgcctataatctcagcacaatagaaagccaagacaggagggtcacttgatgcctggagatcaagataagtatgggcaacgtagcaaggcccatccctacaaaataaaaaaaataagccaggcccttggcatgtgtctgtagttccagctactcaagaggccgaggcaagaggattgctcaagcccaggagtttgagagtttgagcagtgagctctgatcttgccatttgtactccagcttgggtgacagagcgagaccctgtctcaaaagaaaaaaaaggctagtttttatgacttcaacctgaactttgaaatttcttcatgtgccttccctacaggcctttcactgtggtctgggaaagaatcagtaagatgacagggctgacttcattagatgaggagcgtttctatccagtttcctggaggaataaggacactgccttttcagattaaagattgtctgatttagagaccatggaggtggacagagaataacaaaaccgtgatggcagtcatcatgcttattgcagttagcacacacttttcctgacaggcacagtgctgctgtgctctacaaatgaccatgaaatagagcacgccatgactttaggacacagggatttttatgggaagagagttcatcagggactgattacgtaggagagacgatgcaggggaaatggtggccaccgtctccattgaatagcaatagctgctgtttagcaaagactgattaaaaagtactctgatttttcaaatggaagagagaacagttaaatcagagtagagagtttaatcaaaactaccagtggaacatgttcttgagtaggattcacatttaactgctggcataatttgcaactgttggattttctcatgtttggaacaataaagttgaaattttccaaagtgtgaatgatttaccttctttctaccaatattgttttatctcgtctcaggaggatactttatagcagacaataataaggcaccattaggatttttaaattaatttatttttaaaattaaagttctagtgtacatgtccacaacatgcaggtttgttacataggtatacatgtgccatattcgtttgctgcacccatcaacttgtcatttacgttagatatttctcctaatgttatccctctgccagccccccaccccccgacaggccccggtgtgtgatgttacccgccttgtgtccaggtgttctcattgatcaattcccacctatgagtgagaacatggggtgtttggtcttctgtcactgtgatagtttgctgagaatgatggtttccagcttcatcaatgtccctgcaaaggacatgaactcatcctttttatggctgcatagtattccttttttttttttttttttgagatgaagttttgctctgtcactcaggctgaagtgcaatggcacgatcttggctcactgcatcctctgcctcccgggttcaagtgattctcctgtctacacctcccaagtagctggattacaggcatgcaccaccatacccggctaatttttttgtatttttagtagagatggggtttcaccatgttggccaggccggtctcgaagtcctgacctcgggtgatccagccacctcgggttcccgaagtgctaagattacaggcatgagccacggcgcctggccaggatttttaaggttgaagcatccacaacaattttgtgtgtgaaatgaaatgacatgcacttttgggtatatacacttgggtaagtatgattttgggtaataatacttagtacttaagttattctctctactctttgtttttgttttttgtttgttttgttttgttttgagatggagtttcgctcttgtttcccaggctggagtgcaatggtgtgatctcggctcaccgcaacctccgccttccaggttcaagtgattctcctgcctcagcctcccgagtagctgggattacatgcatgtgccaccatgcccagctaattttgtttttttagtagagacagggtttctccatattggtgaggctggtctcgaactcctgacctcaggtgatctgcccacctcggcctcccaaagtgctgggattataggcatgagccaccacacttggcctacctctctactctgccctaagatgcttttgtgggtaaagtgaaaatcacataacagtgcagcttcatcatcatatgccctcaatgttcatcactgttgataaacatgcactgtattatgtttctgtgtgcctttttcttgtgtgccaagtaagacccatggcaggcaccttcattttcaggaagcgaaaatacagatacagtaatatggaaaataggacaaagtgtggacttcaggatgaaaatattgtaacaatcttgctgttgacctcgtagcgctcagtgacataatttgaaaaaatattaatgttcagaaatgttctcttgaggatgaacacacagattgggaatttcgttttgctttggtagattaactagaaacttcacattttcacccttataacctttttggtaatttgaacttttgatcattcttctggaactgctttgacatccacctgaagtttggtttgggtattgagaatgatgatgccattcactaatgtgatctcaaaatgtttactccataatgaggctttctggggagagcagggtagacttccccggttggtccaaatatgactagggaatcggcataggtgactggcttggggtatgatgattgttaagggatagggcttgggcaggggtgcccacttgtggtttgaactttcagctggtgccaaaggagtgggcactgaggatttttcagttgaccagatgggcagaataggaagagggagtgcagaggtgtaaaaggcgttggtgttcagacatcacaaaatgcagtcaactctaggacaactctagcttcctctggaagctcctgccatcttggttaggaaagactctgattttcttcatgataatatcttacgttccttttatagttacagatacaggtctcattgcacaatatgattgttgaaaacacttgtgaaatttttttagtaaaattgcctaagatactttttatagtagacaatgaaaattagtgtgtgggtttataataaatataatgtattatataatatgattaaaatatatttgttataaatatgatattactagaagagcatttttccaaaagctatggaaatgtcattttcccgttacagcatcaagcaatatattccatggttcattttcaactctaataaaattatattttgtgtttatatatgcacgtatagacacatatataatattttttttttacttttttctttttctgtacattgcatccagatgctatgcttgtttgtttttttttttgagacagagtcttgctctgtcacccaggctggagtgcagcggtgtgatcttggctcattgcagcctccgcctcccaggctcaagtgattctcctgcctcggcctcccgaatagctgggattacagacatgcaccatcaccacacctggctaatttttgtatttgtaatagagatggggtttcaccatgttggccaggcatggtcttgaactcctgacttcaggtgatccacccgcttcggcctcccaaagtgttgggattacaggcatgagccaccatgcccggccagatgctatgcttaatacattttttccgaatgtcactctagtgaaaattttaggggacacaaaaatgagactgttgtttggagacaatattttttgacaagagtatgcacaagacaatggcaggtataaacgttttattgtaaatatgaaaaaggaaaaaatgctttcactatattagaggacttgaagtaacgtgaagtgattccaaccctttatctttattttatttatttattttattatttatttttttgagatggagtttcactcttgttgcctaagctggagtgcaatggagtgatctcagctcactgcaaccttcacctcccgggagcatgctgctctatcttttttttcagatgtttgagctattccaggttttttgggatttctgttggtttgttttgttttttgcttttctacataattgtttggataatcttgtcagtatctacgaagtgccttgatagtaaatatattaaccctgtgtatcaatttggggtaatttcacatttttttctatgttgagtttatcaataaattgatattgtatatgtctcta

SEQ ID NO: 210 - protein, 468 aa, Homo sapiens
MAQLRRGHLTFRDVAIEFSQEEWKCLDPVQKALYRDVMLENYRNLVSLGICLPDLSIISMMKQRTEPWTVENEMKVAKNPDRWEGIKDINTGRSCAVRSKAGNKPITNQLGLTFQLPLPELEIFQGEGKIYECNQVQKFISHSSSVSPLQRIYSGVKTHIFNKHRNDFVDFPLLSQEQKAHIRRKPYECNEQGKVFRVSSSLPNHQVIHTADKPNRCHECGKTVRDKSGLAEHWRIRTGEKPYKCKECGKLFNRIAYLARHEKVHTGESPYKCNECGKVFSRITYLVRHQKIHTREKPHKCNKCGKVYSSSSYLAQHWRIHTGEKLYKCNKCGKEFSGHSSLTTHLLIHTGEKPYKCKECDKAFRHKFSLTVHQRNHNGEKPYKCHECGKVFTQVSHLARHQKIHTGEKPYKCNECGKVFTQNSHLANHQRIHTGEKPYKCHVCGKVFRHSSWFVQHQRSVHERVLTN

SEQ ID NO: 211 - DNA, 2277 bp, Homo sapiens
gttcgctgcggcgaccagctccggaaagcgcggtggggacgcgctgtgttctcgcagctcagaggcgggtctgaggctcggtggcggcgcccagggtggcccgggccctttcctcggtcgttgtctcaccgccacaggctccgatggcggcggccacgctgagggaccccgctcagcagggctatgtgacctttgaggacgtggctgtctacttctcccaggaggaatggagattgcttgatgacgctcagaggctcctctaccgcaatgtgatgctggagaactttacacttctggcctctctgggacttgcatcttccaagacccatgaaataacccagctggagtcatgggaggagcccttcatgcctgcttgggaagttgtgacttcagccatactgagaggtagttggcaaggagccaaggctgaggcagctgctgagcagagtgcttctgtagaagtgcccagttcaaacgttcagcaacaccagaagcagcactgtggagagaaacccttaaaaagacaagagggcagggtcccagttttgaggagttgcagagtccacctatcagagaagtccttgcaaagcagggaagttgggaaggatcttctgaccagctcaggtgttctcaagcaccaggtgactcacacgggagagaagtcacataggagctccaaaagtagggaggcctttcatgctggaaaaaggcattacaaatgcagtgaatgtgggaaagcctttggtcagaaatatttacttgttcagcaccagagactgcacactggggaaaagccttatgaatgcagtgaatgtgggaagttatttagccataagtccaacctttttatacaccaaatagttcacactggagaaaggccttatgggtgtagtgactgtggaaaatcctttagccgtaatgctgacctcattcaacaccagagagttcacactggagaaaagccttttacatgcagtgaatgtggaaaagctttcaggcataattccacacttgttcagcatcacagaatccacactggagtaaggccttatgagtgcagtgaatgtggaaaattgtttagtttcaactccagcctcatgaaacatcagagagttcacactggagaaagaccttataagtgcagtgaatgtggaaaattctatagccacaagtccagccttatcaatcattggcgtgttcacactggagaaaggccttatgagtgcagtgaatgtgggaaattttttagccaaagctcaagcctcatgcaacatcgaaaagttcacactggagaaaaaccttttaagtgcaatgaatgtgggagattctttagtgagaattccagccttgttaaacatcagagggttcacactggagcaaagccttatgagtgcagggaatgtgggaaattttttcgccacagctccagtcttgttaaacatcgaaggattcacactggagaaatacaatgattgtgagaaatcctttagctggtgtttcaacctcattcaacaccagaaagttcacagtgtaaaaaagtcttgaaggttactaatggaaatccattagctatacctccaaactcattcaacactggacagttcacagagtggacaatgtagtgaatatggtaaaaggcctcagccaaaggcctaaccgtattcaacaccagaaagtttagactggagaaaggccttagactgtcgctgaatcaatatgacctgacttaaagcagaaacagccaggcgtggtggctgacacctgttattctcaccactttgggaggctgaagcgggcggatcacaaggtcaggacatcgaaaccatcctggttaacacaatgaaaccacatctctactaaaaatacaaaaatttactgggcatggtggtgggcgcctgtagtcccagctactcaggaggctgaggcagaagaatggcatgaacctaggaggcagagtttgcggtgagctgagatcacgccactgcactccagactgggtgacagagtgagactctgtctaaaaaaaaaaaaaaaaaaaattagcccggcgtggtggcaggcaactgtagtcccagctacttggggggctgaggcaggagatttgcttgaacccgggaggcggaggttgcattgagccgagatcacgccactgcactccagcttgggtgacagagtgagacttcgtctcaaaaaaaaaaaaaaaaaacaaaaaaaacccagaaactctgagggtgatctttatgagggagctggcaattgaacatcattcatccaaat

SEQ ID NO: 212 - protein, 442 aa, Homo sapiens
MAAATLRDPAQQGYVTFEDVAVYFSQEEWRLLDDAQRLLYRNVMLENFTLLASLGLASSKTHEITQLESWEEPFMPAWEVVTSAILRGSWQGAKAEAAAEQSASVEVPSSNVQQHQKQHCGEKPLKRQEGRVPVLRSCRVHLSEKSLQSREVGKDLLTSSGVLKHQVTHTGEKSHRSSKSREAFHAGKRHYKCSECGKAFGQKYLLVQHQRLHTGEKPYECSECGKLFSHKSNLFIHQIVHTGERPYGCSDCGKSFSRNADLIQHQRVHTGEKPFTCSECGKAFRHNSTLVQHHRIHTGVRPYECSECGKLFSFNSSLMKHQRVHTGERPYKCSECGKFYSHKSSLINHWRVHTGERPYECSECGKFFSQSSSLMQHRKVHTGEKPFKCNECGRFFSENSSLVKHQRVHTGAKPYECRECGKFFRHSSSLVKHRRIHTGEIQ

SEQ ID NO: 213 - DNA, 4442 bp, Homo sapiens
agagccccgcctcctcatttgggttctcgagactcccgggaagcggtttgggaagctcgggggtcggctcggaaagtagagggggcgcagctggggcgggaggacagcgtttgtgcccggaagcgggagaggaagcgggaagtttgtgggatccccgccccctgtgtcagtggatgcgaccgggcgggccctcggccttcccggccgctggagagggacttcggccgctggctcccggggcggctgaggctgagcgttggtccggagcaggtgccgggtgcgggccgcggtgtgcgggaccggagcccggcgcgagcggcggcgggggtggggaaagcgcatttgtaacgcgggcgacaacgtgcccgaaatccccggacggtgggtctgcatcgagaccccgagctctggagctggaaaaacccggatgccatactgctgttaacatatgtgacactggagactttgtccctacctcatagaatcccatgcatgatgatacatgaagggttttccgtggctatctacttctgattcttttgaaagctttaaagacattgggcatgaaaggttcagtgagtttccggggatccctcgtttgtggtagagccaggaggaaaacagttccgttcattctttcacagctgaggctttacagttctctatactctcccaagagccacagaaaatgaacacatttcaggcatcagtgtcattccaggacgtgactgtggaattcagccaggaggagtggcagcacatgggccctgttgagaggaccctgtacagagatgtgatgctggagaactacagccacctcgtctcagtgggctactgctttacaaaaccagaactgatcttcacattggaacaaggagaagatccatggttattagagaaagagaaaggatttctaagcaggaactccccagaagactcccaacctgatgaaatctcagagaagagcccagaaaatcaaggcaaacatttgttgcaagttttattcaccaataaattattgactacagagcaagaaatttcaggaaaaccacataatcgagacataaacatttttcgtgcaagaatgatgccttgtaaatgtgacattgcggggtctgcttgccaggggctcagcctgatggccccacactgtcagtattcaaaagaaaaggctcatgagcgtaatgtttgtgacaaatggctcatcagtattaaggatggcagaactaacactcaagagaaatctttcgcttatagtaaaattgtgaaaaccctccatcataaggaggaagttattcaacatcagacaattcagactctggggcaagattttgaatataatgaaagtagaaaagcttttcttgaaaaggctgcccttgttacatctaacagtacccacccaaaaggaaaatcttacaatttcaataaatttggggaaaacaaatatgataaatcaacctttattattcctcagaacatgaatccagagaagagtcactatgagtttaatgatactggaaattgtttctgtagaatcactcacaaaactctcacaggagggaaatccttcagccaaaagtcacacattagagaacatcatagagttcatataggggtgaaaccctttgaatatggaaaaagtttcaaccgtaattcaaccctcccagtgcatcagagaactcatgcaacagataaatactctgattatcacccatgtacagagacattcagctaccagtcaactttcagtgtacatcagaaggttcacataagggcaaaaccctatgagtataatgaatgtgggaaatcctgctctatgaattcacacttgatttggcctcagaaaagtcacacaggggagaaaccctatgaatgtcctgagtgcgggaaagccttcagtgagaagtcacgcctaagaaaacatcagagaactcacacgggagagaaaccatacaaatgtgatggatgtgataaagctttcagtgcaaagtcaggcctaagaatacaccagagaacccacacaggggagaaaccattcgaatgtcatgaatgtgggaaatcttttaactataagtcaatcctcatagtgcatcagagaactcacacaggggagaaaccttttgaatgtaatgaatgcgggaaatctttcagccatatgtcaggcctaaggaatcaccgaagaactcacacaggggaaagaccatataaatgtgatgaatgtgggaaagctttcaaactgaagtcaggcctgaggaaacatcatagaacacacacaggggagaagccctacaaatgtaatcagtgtggaaaagctttcggtcagaaatcacaactcagaggacatcatagaattcacacaggggaaaaaccctataaatgtaatcattgtggggaagctttcagtcagaaatcaaacctcagagtacatcacagaactcatactggggagaaaccctatcaatgtgaggagtgtggaaaaacattcaggcagaaatcaaatctcagagggcatcagagaactcacactggggagaagccctatgaatgtaatgaatgtggaaaagctttcagtgagaagtcagtcctaagaaaacatcagcgaactcacaccggggagaaaccatataattgtaatcagtgtggggaagctttcagtcagaaatccaatctcagagtacatcagagaactcacacaggggagaaaccctataaatgtgataaatgtgggagaactttcagtcaaaaatcaagccttagagaacatcagaaagcccacccaggggattaaatgtatgcatataaagaatacgaaaaaactctgagctggaaatcaaacctcacaatacataaatgaacacacaggagagaactgttaacatagtgagcactggaatttcctctacaatttcagcctccaccaaatatcaaagaatagaagataaattgttgaaatctattttatatgggcattctttcagccagagcccagtcttctatggatatacagaactcacacagcaaagaaaccctataaacataatgaatatggaaaatactcttgcgaactcactcctcagaaaactcacgctgcagaaaagctctgagaaagtaataaaaatgtgaaaactttgtgccaacaatcaaaactcattcaccatcagagaaatcacacaatgacaaaagctagaatataataagtgtgtgataaactttaatgaaaagtcagtacagcagaaaatacattcaagatagagacctcatagtatattaaaacaaacaagaaatgaagttaatggatgtgggaaattcttctgccatgtcaaccctcattttaacctacacagaggtaatccctatatgtcgtataataactattgaaatgttcactagtaatcattttcacttctccctcatgccacacctggcctaaatttctcaaccactctctcatctaaacggggtcatattgttaccctctagctagtggaatatggggtcagtgacaggtcttaaatacatcagtcaaattctcaatattttcttctatccctcattagaatggaatggaggaaaaccttgggactcaggctctgatgatggaaagtacaagatggtaggaacccgggtcagagaaggatcctgtggcatggagttttctcctccctgtacacagttggacttcttgcagtgaggaaataaatgtgttccctgctgaacttctaaaggtttgggtatacttgatactgacagaaactcaacaaccctcacataataaaacttaggagtatgatttttcaggacatctgaactcagtgtatgtcagaaaagtcacataggacaaatctcggacagcatcctgaatgaccatggcttttatccccaaagtcttcctcatcagacaggtaatatcataagaaatctgacattttaacaaatataggaaattcttcacacacacagacacacactcacacatacacacccaaagtctcattaaatatatgataatttagttttgaatgtgtaaaagttttcaacaaattatcatattttatatcagagcttgttacaaggagaaaatctatcaatttgagaaaggtaagtaatagcctttatctagatattgctttatcagaactgttgtttcacatataatatcaaaacttttaatgaaatataagacattcactataataaaaagcttaaaaagaacaaaaaataaactgcataaactgaaaagcagtgttgcaaatatgtgaatgttttgtgagttattgattgtttatgtatgtatatatgcatggtacttaccaggtatttgttttatgtttcttagacctcaacattgctgtaaaagaattgtgttccccttgctttataactactttgacatcagctacaatttgccacatgaatattaataacaaaccttttacagaaaa

SEQ ID NO: 214 - protein, 699 aa, Homo sapiens
MNTFQASVSFQDVTVEFSQEEWQHMGPVERTLYRDVMLENYSHLVSVGYCFTKPELIFTLEQGEDPWLLEKEKGFLSRNSPEDSQPDEISEKSPENQGKHLLQVLFTNKLLTTEQEISGKPHNRDINIFRARMMPCKCDIAGSACQGLSLMAPHCQYSKEKAHERNVCDKWLISIKDGRTNTQEKSFAYSKIVKTLHHKEEVIQHQTIQTLGQDFEYNESRKAFLEKAALVTSNSTHPKGKSYNFNKFGENKYDKSTFIIPQNMNPEKSHYEFNDTGNCFCRITHKTLTGGKSFSQKSHIREHHRVHIGVKPFEYGKSFNRNSTLPVHQRTHATDKYSDYHPCTETFSYQSTFSVHQKVHIRAKPYEYNECGKSCSMNSHLIWPQKSHTGEKPYECPECGKAFSEKSRLRKHQRTHTGEKPYKCDGCDKAFSAKSGLRIHQRTHTGEKPFECHECGKSFNYKSILIVHQRTHTGEKPFECNECGKSFSHMSGLRNHRRTHTGERPYKCDECGKAFKLKSGLRKHHRTHTGEKPYKCNQCGKAFGQKSQLRGHHRIHTGEKPYKCNHCGEAFSQKSNLRVHHRTHTGEKPYQCEECGKTFRQKSNLRGHQRTHTGEKPYECNECGKAFSEKSVLRKHQRTHTGEKPYNCNQCGEAFSQKSNLRVHQRTHTGEKPYKCDKCGRTFSQKSSLREHQKAHPGD

SEQ ID NO: 215 - DNA, 4424 bp, Homo sapiens
gggacgcagttcgctgccgcccggcagtagctctcaggttaggcgggtcccgctccgcttccgccgtcgctgccgcgccgccccgggcccgacaggccgggtccagggactgcaacccagcgagggacgcgggcagccatggccgaagcggcgcctgcccgggaccccgagacagacaagcacacagaggaccagagtccttcgacacccttgccccagccagctgctgagaagaactcgtacctctactccacggaaatcacactgtggacggtggtggccgccattcaggccttggagaagaaggtggattcctgcctgacccgcttgctgactctggaggggcgcacggggacagccgagaagaagctggccgactgcgagaagacagctgtggagttcgggaaccagctggagggcaagtgggccgtgctggggaccttgctgcaggagtacgggctgctgcagaggcggctggagaatgtggagaacttgctgcgcaacaggaacttctggatcttgcggctgcccccgggcagcaagggggaggcccccaaggtgcccgtgaccttcgatgatgtggccgtgtatttctctgagctggagtggggcaagctggaggactggcagaaggagctctacaagcacgtgatgaggggcaactacgagacgctggtctccctggattatgcaatctccaaaccagacatcctcacccggatagagaggggagaggagccttgtcttgaccggtggggccaggagaaggggaatgaagtagaggtgggacgtccaaggatgatgggcactggcctccctccgtatccagagcacctcaccagcccacttagccctgcccaggaggagctgaaagaagggcaggcccccaagcagcagcaggactcagaggcgagagtggccccagccgggccagaagcaggtggtggtgtggccatcaagacagaggcacagtctgaagacgagatgacgcctgagcggctctttctgggggtgtcccgaggccagaccgagtgtagaatcccccgagggcccaggaacaggcctgggggccccagccgtcatcaggcccagggcatgcccagggtgcgggcaggggagccacggccaccgggggccagtggggagacgccccgagtcctctcccgcaggcggcagcgggcattcccctgccccgactgcgggcagagcttccgcctgaagatcaatctgacgattcatcagcggacccatgtggaggaggggcggcaggaggcccccggccgctcgcccaccagctgcggggacagccaggccatgctggagccgggggaggtggtggtacccggccctgtcatccgctggctccccgaggagcctgagggtcgccgctccgtggcagggggccgtgccttggtggggcggcggcctgcagccagcaagatgtaccactgcagcgagtgcctgcgcttcttccagcagcgcaagagcctgctgctgcaccagcgcctgcacaccggcaatggccagggctggcccgcctgcccctactgcggcaaggccttccgccggccctcggacctcttccggcaccagcgcatccacaccggtgagcggccctaccagtgcccccagtgtggccggaccttcaaccgcaaccaccacctggccgtgcacatgcagacccacgcccgaggccaggtgggcccacacttccctgccgcccccgcccgccacgggagcctgcccctgccctggcccagccggaaggaggagggctgacctggcaggagcccacagaggacccctggcggggtctctcccctgtgcctgacgcaggttcttccttttcctgggatggagagaggtttgttgtttttacccattcaaatgggaagctagctgcccttctggtgacattgtgtgtgaccgggtgctttctgtttcctgtttgcactcttcgctgccttttctgcattcctgacttctaaaagatgccttaaggcttaagggatgccatatttttgataaggcctctggtaggtaccacagccaagaggaccagagatcatggcccttccagtatgggggcgatagagacatcggggacctgggatttttgttttgtgcagagatctcctgcctgctgtcaccatgagaaacagtggagtggagtggatggatggcctgacttgaagaaagggccctggaaagttttctactttgctattttgaaatttttttcccttcttatagagactttgaaatacttttgtaaatgtgtgtagttgttaatggaactttgccttttgcaaagtcggaaagagtcggcttttccatgtgaggctcgcagagctgaaaggggagctacgtccaccagcctgtgggtcttttggttttttttttgttgttgttgttgtttttttaagatggagtttcactcttgttgcccaggctggagtgcaatggtacaatctccgctcactgcaacctccgcctctcgggttcaggtgattctcctgcctcagcctcctgagtagctgggattacaggcgcccaccaccactcccggctaatttttgtatttttagtagagacagggtttcatcatgttgtccagactggtctcgaactcctgatgttaggtgacccgcacacctcggcctcctgaagtgctgggattacaggcgtgagccaccactcttggcccagcctgtgggttttgatggggatgtcttggctgctgtcttggaggcacagtgtctccccatgtgtgtgtttcttggcccagagtgactcccagtattcctagtccttccccacaggatagtcacatccattatttacttttgttgtcagctgggaggggaaactgaagcctggacacgtctccccaagggctcagtgttcatgggtgtgtaagatccattgactggaccccagaaagcaccctgaggggcagtgcagagagagcccaggaagcccctccactagaggaggcccttggtctggctgaggaccacgtccaccctgggcctccaggcctgcttttcacattaaaggcggggcagtctcctctcaaaggagttctcccttgagcactttgggctctggggcagagttgggctaggagatctgggtgaatcctttagtcacagctagtctcatgttcctcttctgtcaaaggggtcatggccccagtgtgtcctacctcagagttgtcagggtcaaagtaacaggcactgggacaaatatgaagcctagctttgtgcttcctttcaaattcagggcctcctttctactccattccagcctttttttcctgtcagaatccctcaggaaggacctttatcttctggagtgagtggcagttccactgggttcagtgaaagagtcgcccatggggctctgttccccaggagtcctttgtattttggtgaacaaattcttaccaaagcatgagattcggactgtagaagttcagactgcctcagttcagactgcctcatggggcagtctggaggtcagctggcttctggtgtctctcatcacaccactgcggacgctgtctgtagagcagccttggtgtgggtgactctgaagctggagtgatgggaccccagctatccttgttttttaccgccttgtctggcactgtgaccacgcttcagggctgcttctgggggtcttggtccctggatgtgccatttccttgcccttctgaccctcacacttcttccaaagtcttgagcagagttgggggccaatggtagcattgctgtcatctctgggaggagagtgagtatacaagtcagtgacagttcagccaggctcccttgggtttgggaagaggcactgcccttctgtgctgtggatcctgcttgtctgctctggagtccccccacccttgccaggagcttcacaaaccagagacgggctgtcagcaagagctcagacaggatgtggtgcaagtgcaggtgcacgagtttaaccctcagctgcaggagctagtctcaggtgttctggggatgcctcaggctaagaattttgccgactttctgggcttggttggctaatgccaaatgcccctgcttaaatatcacaaggtgctgattctccttttttctttttttcataccaatgtgctcaaactttgagctaggtcttgtgagtttgcctagcactcagacctgtttaagtaacgttctttacattgaaacaagtcaaccgaagctttgtggtgcaggagctgagggtgccccagactcagtgggagccctggttgggccccaaactctcccagcagggtcctcggtttcctcatttgtgaaataaatgagtgggccacgacgttaataagcccaagagaactgtgaaggtggtagtcccttgccctaattggtgctcaataaagttgttggcataaa

SEQ ID NO: 216 - protein, 546 aa, Homo sapiens
MAEAAPARDPETDKHTEDQSPSTPLPQPAAEKNSYLYSTEITLWTVVAAIQALEKKVDSCLTRLLTLEGRTGTAEKKLADCEKTAVEFGNQLEGKWAVLGTLLQEYGLLQRRLENVENLLRNRNFWILRLPPGSKGEAPKVPVTFDDVAVYFSELEWGKLEDWQKELYKHVMRGNYETLVSLDYAISKPDILTRIERGEEPCLDRWGQEKGNEVEVGRPRMMGTGLPPYPEHLTSPLSPAQEELKEGQAPKQQQDSEARVAPAGPEAGGGVAIKTEAQSEDEMTPERLFLGVSRGQTECRIPRGPRNRPGGPSRHQAQGMPRVRAGEPRPPGASGETPRVLSRRRQRAFPCPDCGQSFRLKINLTIHQRTHVEEGRQEAPGRSPTSCGDSQAMLEPGEVVVPGPVIRWLPEEPEGRRSVAGGRALVGRRPAASKMYHCSECLRFFQQRKSLLLHQRLHTGNGQGWPACPYCGKAFRRPSDLFRHQRIHTGERPYQCPQCGRTFNRNHHLAVHMQTHARGQVGPHFPAAPARHGSLPLPWPSRKEEG

SEQ ID NO: 217 - DNA, 3208 bp, Homo sapiens
acggacttgtctgaggaaagacaggaaagcgccagcatctccaccttccccggaagcctccctttgccaggcagaaagggtttcccatggggccgcccctggcgccgcgcccggcccacgtacccggggaggccgggccccggaggacgagggaaagcaggccgggcgccgtgagcttcgcggacgtggccgtgtacttctctcccgaggagtgggaatgcctgcggccagcgcagagggccctgtaccgggacgtgatgcgggagaccttcggccacctgggcgcgctgggattttcagttcccaaacccgcttttatctcgtgggtggaaggagaagtggaggcgtggagcccggaggcccaggatcccgacggtgagagctctgcagctttcagcaggggccaaggacaggaagcaggatccagggatgggaatgaggagaaggaaaggctgaagaagtgtccaaaacaaaaagaggtggcgcatgaagtggctgtcaaggagtggtggcccagcgtcgcctgcccagagttctgcaaccctaggcagagccccatgaatccctggctcaaggacactctgacccgaagactgccccactcttgcccagactgtggccgcaacttcagctacccttccctcctggccagccaccagcgggtccactccggggagcggcccttctcctgcggccagtgtcaggcgcgtttctcccagcgcaggtacctgctccagcatcagttcatccacaccggcgagaagccctacccctgccccgactgcgggcgccgcttccgccagaggggttccctggctatccacaggcgggctcacaccggggagaagccttacgcgtgctcagactgcaagagtcgcttcacttacccctacctgctggccatccaccagcgcaagcacacgggcgagaagccctacagctgccccgattgcagcctccgtttcgcctacacctccctgctggccatccacaggcgcatacacaccggcgagaagccctacccctgtcctgactgcggccgccgcttcacctattcttccctcctcctcagtcaccggcgcattcactccgacagccggcccttcccctgcgtggagtgtgggaaaggcttcaagcgcaagaccgccctggaagcccatcggtggatccaccgctcctgcagcgagaggcgcgcgtggcagcaggccgtggtggggcgttcagagcccatccctgttttgggaggcaaggatcccccagttcacttccggcactttccagatatatttcaagagtgtgggtgatggcgttcacacaaactggtcagcgtttccctggagaggaagaggcaaggtttgtgtatttgggggataaggaaaggaagtgggcgtttgaggaaaacaaagttctgccttaggtaaaaagcagaggtaggggcacagagggctgtggggaggaggcaggaatctgaaaaggtgcctgggggttgaccccattttctgaagctccagcacacagggccccgtgttcacgtcccatccttcactgaaaaccattcacctaactggcttttccttcatgattgttctctcccttgtagctctctgctttttggcctgtatctctcctactcctctgagatggggtcccctacattccagtgcctattaaaggagcctgcacccactctggaccccccagaatagaggggatacctcaggcctgtccctcggctggtggggggggcggagctcatcccaggattcttttcttttttttgagatggagtcatgctctgtcgcccaggctggagtgcagtggcgtgatctcggctcactgcaacctctgcctcctgggttcaagccattctctgcctcagccttcccattagctgggattacaggcatgcgccaccaggcccagctaatttttgtgctgttagtagagacggggttccaccatcttggccaggctggtcttgaattcctgacctcgtgatccacccgcctcggcgtctcaaagtgctgggattacaagcgtgagccaccgacccctgccgaggattctgccttttaccaatgcaggtgaaacatctggcaaggagacacctggagtgtaggtgttccttggtcttgaagacctagaggtggccatagagaggacagtggcctcaggtggggaactccccccccactctcattctgcaagtgcacaaactatcaaacatagcggactctggaactgggccaactcttcactgtatgcattagtgattgcagtgtttttttcttcttcagatatttgcatgttccctggattttgtattttttgataaagatatattcttgggccacagtagctggagatataatgccggaggattcttttttttttttttttttttgagacagagtctgtctctattgcctgggctggagtgcagtggcccaagctacgctcactgcaagctccacctcctgggttcacaccattctcctgcttcagtctcccgagtagctggaattacaagcacccgccaccacgcccaactaatattttgtatttttagtagagacgggggtttcaccgtgttagccaggatggtctcgatctcctgacttcgtgatcctcccgcctcggcctcccaaagtgctgggattacaggcgtgagccactgcacccagcctctttttttttttgagatggagtttcgctcttgttgcccaggctagagtgcaatggcatgatcttggctcactgcaacctccgcctcctaggttcaagcgattctcctgccccagcctcttgagtagctgggattacaggcacccacgaccatgcctggctaattgcatttttactagagacaggtttcaccatgttggccaggctggtctccaattcctgacctcaggtgatccacccgacttggcctcccaaagttctgggattacattttttttttaaagaaagaataaattaattgtgattaaagttgaaatcaaggcatagtctttccagtctaatttttactgtaatgcttgtatgtcaacagttatgaaggccaggcgcggtggctcacgcctgtaatcctagcagtttgggaggctgaggagggtggatcacttaaggtcaagagttcaagaccagcctggccaatatggtgaaaccccatctctactaaaaataccaaaaaaaaaaaaaaaaa

SEQ ID NO: 218 - protein, 405 aa, Homo sapiens
MGPPLAPRPAHVPGEAGPRRTRESRPGAVSFADVAVYFSPEEWECLRPAQRALYRDVMRETFGHLGALGFSVPKPAFISWVEGEVEAWSPEAQDPDGESSAAFSRGQGQEAGSRDGNEEKERLKKCPKQKEVAHEVAVKEWWPSVACPEFCNPRQSPMNPWLKDTLTRRLPHSCPDCGRNFSYPSLLASHQRVHSGERPFSCGQCQARFSQRRYLLQHQFIHTGEKPYPCPDCGRRFRQRGSLAIHRRAHTGEKPYACSDCKSRFTYPYLLAIHQRKHTGEKPYSCPDCSLRFAYTSLLAIHRRIHTGEKPYPCPDCGRRFTYSSLLLSHRRIHSDSRPFPCVECGKGFKRKTALEAHRWIHRSCSERRAWQQAVVGRSEPIPVLGGKDPPVHFRHFPDIFQECG

SEQ ID NO: 219 - DNA, 1616 bp, Homo sapiens
agcgagaggctctgaggctgccagagtggttgtgtctgttcctccggtaaggggtgattcgccgaggggcgcggaccagacagacctcgggtcaggcccgggaaccccgagaggagagcccagcccctggtggaggcggcttggcggagattcggagccgtcagcagctcagccagacgtccaggatcccaccccttgcaaaagaccaggccgtggaagccatgttcccaccagccagggggaaggagctgctctcgtttgaggatgtggcgatgtacttcaccagagaggagtggggccacctcaactggggtcagaaggacctctaccgagatgtgatgttggagaactacaggaacatggtcttgctgggatttcagtttcccaaacctgagatgatctgtcagctggagaactgggacgagcagtggatcctggatctaccgagaactgggaataggaaggcttccggtagtgcttgcccaggttctgaagccagacacaagatgaaaaagctaactccaaaacagaaattttctgaagatttagagtcatataagatatcagtggtaatgcaggaatcagctgagaaactttcagaaaagttacataagtgtaaagaatttgtggacagttgcaggcttactttccctactagtggtgatgaatacagcaggggcttccttcaaaaccttaaccttattcaagatcagaatgcgcaaacaaggtggaagcagggcagatatgatgaggatggcaaacccttcaatcaaagatctttgcttttggggcatgagcgaattctcacaagagcaaagtcttatgaatgcagtgaatgtggaaaagtcattaggcgtaaggcatggtttgatcaacatcaaagaattcactttttagagaatccttttgagtgtaaggtctgtgggcaagccttcagacagcggtcagctcttacggtccataaacagtgtcacctgcaaaacaagccatacagatgtcatgactgtggaaagtgttttcggcagctcgcgtatcttgttgaacataagaggattcacaccaaagaaaaaccttataaatgtagcaaatgtgaaaaaacgtttagtcagaattcaacccttattcgacatcaggtgatccatagtggagaaaaacgccataaatgccttgagtgtggaaaagcctttggccggcattcaacccttctatgtcatcaacagattcacagtaaaccgaacacccataaatgcagtgaatgtggacagtcctttggtaggaatgtggatctcattcagcatcaaagaatccatacaaaggaggaattctttcaatgtggagaatgtgggaaaacgtttagttttaagaggaatctttttcgacatcaggtcattcacactggaagccaaccctaccaatgtgtcatatgtggaaaatctttcaagtggcacacaagctttattaagcaccagggcactcacaaaggacagatatccacatgatgttaattggaaagcagtcattggagaactagaacttataaacctctacttcaagtgtgtatcacgtaattgtttccatgaaaagcaataaatgtaacaaagggtttttctatggga

SEQ ID NO: 220 - protein, 425 aa, Homo sapiens
MFPPARGKELLSFEDVAMYFTREEWGHLNWGQKDLYRDVMLENYRNMVLLGFQFPKPEMICQLENWDEQWILDLPRTGNRKASGSACPGSEARHKMKKLTPKQKFSEDLESYKISVVMQESAEKLSEKLHKCKEFVDSCRLTFPTSGDEYSRGFLQNLNLIQDQNAQTRWKQGRYDEDGKPFNQRSLLLGHERILTRAKSYECSECGKVIRRKAWFDQHQRIHFLENPFECKVCGQAFRQRSALTVHKQCHLQNKPYRCHDCGKCFRQLAYLVEHKRIHTKEKPYKCSKCEKTFSQNSTLIRHQVIHSGEKRHKCLECGKAFGRHSTLLCHQQIHSKPNTHKCSECGQSFGRNVDLIQHQRIHTKEEFFQCGECGKTFSFKRNLFRHQVIHTGSQPYQCVICGKSFKWHTSFIKHQGTHKGQIST

SEQ ID NO: 221 - DNA, 2948 bp, Homo sapiens
gccggagccagcagtggcaacccgctggggtccctttccacactgtggaagctttgttctttcgctctttgcaataaatcttgctacttctcactctttgggtccacactgcttttaccagctgtaacactcaccgcaaacgtctgcagcttcactcctgaagccagcgagaccacgagcccaccgggaggaacgaacaactccagacgcgccgccttaagccttaagagctgtaacactcaccacgaaggtctgcagcttcactcctgagccagcgagaccacgaacccgccagaaggaagaaactccgaacacatccgaacatcagaaggaacaaactctagacgcgccaccttaagagctgtaacactcaccacaagggtccgcggcttcattcttgaagtcagtgagaccaagaacccaccaattccggacacagttggaaatgcagaagggcacttgagtttggctgcagtctcccacacggagaccttctggaggaagatgagccctaaacgcgatgggttggggacaggtgatggtctgcactcacaggttttacaggagcaggtctccacaggagacaatctccatgaatgtgactcccagggaccaagtaaagacactttggttcgtgaggggaagacctacaaatgcaaggaatgtgggagcgtgtttaacaaaaacagcctccttgttcgacatcagcagattcacactggggtgaagccttatgaatgccaggagtgtggaaaagcctttcctgaaaaggtcgacttcgttcgacccatgaggattcacacaggggagaagccctgtaagtgcgtggagtgcgggaaggtcttcaaccgcaggtcgcacctcctgtgctaccgccagattcacactggagagaagccctatgagtgcagcgagtgtggaaagaccttcagctatcactctgtcttcatccagcatcgtgtgacccacactggagaaaaactctttgggtgcaaagaatgtggaaaaaccttttactacaactcttccttaacccggcacatgaagattcacactggagagaagccctgcaagtgcagtgagtgcgggaagaccttcacctaccgctctgttttcttccgacatagtatgacccacactgcaggaaagccctacgagtgcaaagaatgtgggaaaggtttttactacagctattccctcactcgacatacaaggagtcacactggagagaaaccttatgagtgccttgaacatagaaaggactttggctaccactctgcttttgcccaacagagtaagatccactctggaggaaaaaacctttgagtgcaaatgatgtgggaatttgtgggttttctttttttttttttctttgatacatagagagccacactgaggagaagcactctgaattcagtggcagtaggaaagctgtgacctgcagctcatcctcacttggcattgaagaattccttccagagataaactctatgagatatgtgggaaggccttttgcaagtgggcccacatcagtcaacgtcagagaacttaaactgcgaaaagacattttgacaaaaactagtgaagaaaatcttttggccacaggaaatatcttcctcagcatctgagaatttttccaggagggagacctgttggttattgtgcacttaaaagaaccacccacacctctctccatagtttatatcactaagccacttcaggattttttttttttaagtaagaagggaactgtaaaagagaaaaaaagaaattcatgcatagcttctgtcagacttctctgaaagccatgcctatcaaaatttgaattcagttcttcattttgcagatggctgaaaggtacaaaggccttgcctcgttatttgtcctttatatgtattcactcctgtctacaggagaattgtcctctgtaaagattaactctgtaaagatttattgaatgcattctttgttctaaaacattgtactcctgaggaatgtaagtctttgtgagaaatatgaacgcttaagtaatggaatatgtgaaacttgtaagaacgtagaatataaaaatactgccatataaaatcctttcatatctgaggaggtaagtaaccacattgaatgggcatattttgctacatcatttaagactacttaaggctttaatttaacaaaaaacaattcttcatgtggttttgaacacccagtgctcaatatacttgtttgttttgatttattttctcagggacgagagaatgatggtgaagctgtgttgctttcccaggtgagccttgattatttcctctgtgctttctcagcttctttggccttctgtaagaggggcttctccaagagcatgtcactagttttctagaagttaaacaagagctaagacaaacaaaacaaaacacagcttatctaatctaatgagaaactcagaaaaaaatgttttgatgaatacaatgtattaaaatataaaacatgtagatcctttgacatgttaattcaattctagaaatcctcagaaatgtttttatattatgcagagatgtgcgtgcaaagaataatcgctgcagttttgtttttatgtgtgaaacgttgagaacaatctaaatgtttatcagttggaagtaagttatggtacatctgttctatgaaatactgtgaaacaataaggtatctctgtatgtactgatatcaaaacatctctaagatacagtatttagtaaaagagaaagtttcaggaaataaaactacatctagaagtataagcataaaactgttaatagtggttttctgcaggaaatgggatggaccagggttatatgcaatgttcagtttttacttttatacttaagtattgtttatgtttgaaaaataaaaagcatttattgtttttgcaataaatgtttaaaatatttcaataaagatagcatgttagaataaaa

SEQ ID NO: 222 - protein, 273 aa, Homo sapiens
MSPKRDGLGTGDGLHSQVLQEQVSTGDNLHECDSQGPSKDTLVREGKTYKCKECGSVFNKNSLLVRHQQIHTGVKPYECQECGKAFPEKVDFVRPMRIHTGEKPCKCVECGKVFNRRSHLLCYRQIHTGEKPYECSECGKTFSYHSVFIQHRVTHTGEKLFGCKECGKTFYYNSSLTRHMKIHTGEKPCKCSECGKTFTYRSVFFRHSMTHTAGKPYECKECGKGFYYSYSLTRHTRSHTGEKPYECLEHRKDFGYHSAFAQQSKIHSGGKNL

SEQ ID NO: 223 - DNA, 10169 bp, Homo sapiens
ggttccgtccacgccggctctagggagggggcggtgttccgtggccgcctccctggcggcgctggggaaatgagcaggtaggaggccgacagcgacctccgcgtctcggagcgaaccgtgagcctccccgtaacgagagagtttgactgtcagccaaggtcaccgggcccggcgcagggaaggggtggggctcggctgagcccgcgagacccgccctgctcgccgcagcccccgccccgctagggccacagggtcccggtatggcgatggctttgacggacccggcgcaggtgtctgtgacctttgatgatgtggctgtgactttcacccaggaggagtggggccagctggacctagctcagcggaccctgtaccaggaggtgatgctggaaaactgtgggctcctggtatctctggggtgtcctgttcccagacctgagctgatctaccacctagagcatgggcaggagccatggaccaggaaggaagacctctcccaaggcacctgtccaggtgacaaaggaaaacccaagagcacagaacctaccacctgtgagctagccttgtctgaaggaatctctttttggggacaactaacacaaggagcttcaggggactcccagttggggcaacccaaggatcaggatgggttttcagaaatgcagggagaacgcttgagaccagggttagattcccaaaaggagaagcttcctggaaaaatgagccccaaacatgatggtttagggacagctgatagtgtgtgttcaaggattatacaggatcgagtctccttaggagatgatgtccatgactgtgactcacatggatcaggtaaaaatccagttattcaggaagaggaaaatatctttaaatgcaatgaatgtgaaaaagtgtttaacaagaaacgcctgcttgctcggcatgagaggattcactctggagtgaagccctatgaatgcacagagtgtggaaaaacctttagcaagagtacatacctcctgcagcaccacatggtccacactggggagaagccctataagtgcatggagtgtgggaaggcttttaatcggaagtcacaccttacccagcaccagcggattcacagtggagagaagccttataagtgcagtgaatgtggaaaggccttcacccaccgctccacttttgtcttgcataacaggagccacactggagaaaaaccctttgtgtgcaaagagtgtggcaaagcctttcgagataggccaggtttcattcgacactacatcatccacagtggtgagaatccctacgagtgcttcgaatgtggcaaggtcttcaaacacagatcatacctcatgtggcaccagcagactcataccggggagaagccctatgagtgcagtgaatgtgggaaggccttctgtgagagcgcagcgctgattcaccactatgtcatccacactggagagaagccctttgagtgcctcgagtgtgggaaggctttcaaccaccgatcctacctcaaaaggcaccagcggattcacactggggagaagccatatgtgtgtagtgaatgcggaaaggccttcacccactgctctactttcatcttgcataaaagggcccacactggagaaaaacctttcgagtgcaaagagtgtgggaaagcctttagcaatagggcagacctcattcgccacttcagcatccacactggagagaagccctatgagtgcatggagtgtggaaaggccttcaaccgcaggtcaggcctcacaaggcaccagcggattcatagtggagagaagccctatgaatgcatcgagtgtgggaaaacattttgctggagcacaaacctcattcgacactctatcatccacactggagagaagccgtatgagtgcagtgaatgtggaaaggccttcagtcgcagctcgtccctcactcagcatcaaaggatgcatactgggagaaatcctatcagtgtaacagatgtgggaagaccttttacaagtgggcagacctcagtcaacatccaagaacttttattggggaaaaactttttgaatgtcaccactgaggaaaatcttttgcaagaggaagcatcttacatggcatctgatcgtacataccaaagagaaaccccacaagtgtcttcactgtgagaaaaccttctgttgccaaatgtcatttgtcacctaaggagtcatattagaaaatcacgcagcttagagccttattctccatccgaattcatcctggaaaaacacccagtggttattacgcacttgggaaaacctttagctccatctttctcattagtttacagtgcaatgttatctcaggaatttttataaacagaaagaggtgacatagaaaagaaaatgaaatgcagacactgcttttatactgttgtcttgtatgtacatttctgtcctgtgtcaggaaagttagtaagggaaggtctggaaacttactcaatgtctttgttctacaacattgtctcttcttaagaagcattgtttttatgagaaataatgaagccttgagttatgaaatacttttatatttaaggattaaaagaaacatgaatgcgcacattttattgtaccacttaatactgtttaggtctttgattttttaaaaaaattcttttttaatgggttttaaacactaacactgagaatttttcttgattcccatctgttggtttacttgattgctatagctgtatggtaaatctcaaaattaggtaatgtgatttcttttttcttactatttttatttaaaattcatttagcattcctagtttgactttccatatacactttaggattggtttttctgtttttcaaatattcttgcttggattttgatagaaattgagttaaatctatagatcaatgtgttggaaattggcatcttagtcttccaattcatgaacatagcctatcttttcattatttaaattttctttgatatatttcattactgttttatagtttacacagtataactcctgcacatttaaaataagaattatagctgcatagttttttgagtgattgtaaatggcattgatatttaaagtttcaatattcacatgatgttggctagtatacagaaacattattttttcaatcttattttgctgtcttgcaaccttcctaaactcattatttcttgccatttcttttgggagaatccttaggattttaaatatagaaatgtcatttgcaatttgggacagttttatttcttgcttcccatctgtataccttttatttgcttttctcatgttattgtactaggtaggatttccagtgtgatgttgaatacgaatagtgacaagttatccatgccttgttcctgatattagggggaaatgttcagtttctcattattatgatgttgaaagttgcttccaaagagtttctctatcgagtttagaaagtttccctctattcctaatttgctgggatttttttggttattattaataagtgttgaattttgtcatatgctttttctccaccaattgatttaattatgtgatgttacttctatagtcagttgatatgatgtgttaccttgattgagtttcaagtattgaaccagcctcacatctttgtgataagccctacttgatcatggagtataattttgtttgtgtactatgctacagtatttcatttgctagtattttgttgaggaagctttcctctgatttcatgagtgataatctgtagttttctttcttcaactgttactgtttggttttgatgtctagatgataactaacctcctaacatgaattggaaggaattctcttctgtttttttggaagatcatgtgtagaattggtgttatttgttcctttaatgtttggtagctttctccagtgaagaagtgggacctggagattttccttttgaatgctttttaattatgtatttattttatttaataggtatagaactattcagagtatttcatattggatgaatttttatagattttcttaaggaagtgttcattttatgtaaatgttctaatttgtagcattctttgaaatatttccttttatcctcttgatggcagcaggatctgtacttatgttccttgttgtattcttgatattggaaatgtatcacttattattgtcagtctttgtagacatatgtcaatttcattgatcatttcaaagaaatagcactttatatcactgatttttctccagtctctgttcttaatttcactgatatctgctctgatgtgtattgtatcctttctcctacttgctctggttgtatttgactcagtggtttcctgacgtggatgtttaggttattgatttgaggctttttttcttttttaatataagctttaagttctatacatttttcttacactgctgttagtttcatcccacaagtcttaatatgcttttgattatcttactcagttctaagattgcctgattccttttgagacatcttctctaacccaggaattatttagaagtatattgtttaatagtgtttggagtattccctgctatttgttattgatttctaatttgttttgcatttgatgttactgttgaaatttgttgactttttttccttatgacccaggatataggctgtcttgttttacatagctgcttgaaaagaatgtgtgttctcggtcatttggtggagtttctgtaaaagtttgtatgatcctgttagttggtggtgttatttaggtctcctgtatccttgctgattttctgtctagtatttctatcaattgccaagagaaggatgttgaagtcctgagctataattgtggaattacctattcctcctttaagttctatcagtttttgctccacataatttaaagctctgttgtttggtatatacacatgtaggtttgcttagtattcttggtgtattgacccttttataattaagtaatgtccctttttgttcctgttaatactcttatcaatttttatctgatatttgtgtggtcagtcttacgttttggttaatgcttgcatgatttacacttcatcatttttttaaaccttatctatatcactatattgggagtaagtttcttgtgaatggcgtatatttgggctgtggttttatatccagtttgcgtatctttttttttttttttttttttttttgagacggagttttgttcttgttgcccaggctggagtggagtggtgcgatctccgctcactgcaacctccgcctcctgggttcaagtgattctcctgcctcaggctcttgagtagctgggattacaggcatccgccaccatgcctgactgattttttgtatttttagtagagatggagtttcaccatgttggccaggctggtctcgaactcctgacctcaggtgatccacctgcctcagcctcccaaagtgctaggattactggtatgagcaaccacgcacagcattttttttttttttttttttttgagacggagtcttgctctgtcgccctggctggagtgcagtggcgcagtctgcaacctctgcctcccgggttcaagccattctcttgcctcagcctcccaagtagctgggattacaggtgcctgccaccacacctagctaatttttatatttttagtagagacggggtttcatcatgttggtcaggctggtctcaaactcctgacctcaggtgatctgcccacctcagcctcccaaagtgctgggattacaggtatgtgtcactgtgtctggccccagtttgcatatttctgtcttttattggtgtatttagaccatttaaagtttacaataattatgttagtgctatgtctgctattttatgattagttttttgtgtttcctgttgcttctttcttggtttgtttgggtttttttttttttgtctttaacattttttagaattccatttgatatatttgtagtgttttttaaatatatttctttgtatttttgtattaattttttagtggttgctttaagtagtataatgtacatatgtaacataattacagttaatggtatgaaaaatttagcactttgatgtatagaaaccttacttggtcccttcaccttgcctgttaatataattgtctaaagtaattcctcttcaaaattgagcaccatgttggaaaatgtaatttttgcttccactgtcaaatatattttacaaaagtcacaggaagtattgcttgttgatctctttacccattccactattctttcttgaaattctaagccaccttctattaacattttctttctgtttggcgaacttgtgtaaccttttttctagggtcagtctgctggtgtctctaaaagtgtctttatgttcccttcattcctgagggatatttttgtgggataataggatttagggtctgcagttcttttagtacttgagaaacatgtttgttccttctgtccgctatggtttcagatgagaaatctgttgccatttgaaccattgttccctagttcataatgtgccatttttatcaacctgcgttcaaagtgttttgttttttttgtagtgttcagaagtttggttatgaggtgtgtgacatggaatttttttgagtgtatcatgtttggtttttgtttagctttttgatttgtcggtttatgccctttgccaaatttgggaatttttaaccattatttcttgaaatattttttcatccctactctttctcctctctgtgatatgaatggtagagcttttgttactgtctcagaggtctcttgtgctttcatgtttaccccctttttctggtctatttttccctttttttcatattggttaatttctgttgactttttttcagctcactgattctttttttctgccatatgcagtctactgttgagcttgtccaatgagttttcgttttggtttttgtatttttcagttgtttaatttccatttgttttgttttgttttgttttgtttttttgagacagactctttgctctgttgcccaggctggagtgcagtggcgcgatctctgctcactgcaagctctgcctcccgggttcatgccattctcctgcctcagcctcccgagtagctgggactacaggtgcccgccaccatgcccggctaattttttgtatttttagtagagacggggtttcactgtgttagccaggatggtctcgatttcctgatctggtgatccacctgcctcggcctcccgaagtgctgggattacaggtgtgagccactgtgcctggcctccatttggttcttttgtacatctttgatttctttgcttagtttataatactaaagggctcagaaaacagaaaaaactaaattccagagtcatggttttctggtggtttgtctcaatatttgaatagaaatcctaaattatctggaggagtagaagtcctgtaatcttttatattgggcttcttaaatatttctgtcaacagatcttatatcagggtgatctgcatatcattcagagttacgtactccacgggaaggttgtatgtaaaatcctccagctctgtaagccttgttatatcctcaatggagaaggggtcattccttttctaagatcactcttacacttttttattagacacacacacacccttccccaaccaaacttgtctaagtcctctgtctttcatactcttgtttagtctttaacttctccttattaaccagcttctttcccataatgtatagctttagtcggatctcaagcctcgtttccaacctatttcacccttccttgcctatcaagctctggttattctttcttccacacacatgccctgagtaactattctgtgcactgtcgccacccctttacatttccttttactccccagatactactaaatggcttccaccaccgttgcctgacttaagcacgtctcagaaaggtcccttttgaccccctcactctctttttggacctccatactgctaaatctctgacttgaaggtcctttcctggcttctgtgaattcctggcttttttcctttttagggtctgtgtctttcttccatctgtaaaacagctttacttcccagcatccatcatgatcattgctgttttctaacttgtccttcaccccatgactgagttaatttgcgctgaagacactttactctcaattatctacagtgtttccctaaatctgtgtctccaggttggatgtttctcatgtcgttaaccactggtcatccttccacaccttttctgtatttgcactcactgagcctatatgcatgtatcatgtggccatgaccttggccgtggggatgcacccataatcatcataagagaacacaaattattactgtgtatcagacattgtttcgaatgttttacatgcgtcagctcttttaacctttatgacaactccataatgttatttcccccctttaactgattagaaaactgaggtacagaaagattaaggaatttgtcaaagatttcacaattatgaaatttgggtttggggactggaagccactgcactggcttcagaatccatgtccttaaccactttattgcttctcataaggtgggtctttgtttcctggtcatcacttgtttttactaaaatgggtcaaactgtgctcatttatttataatctactattcttatttgacagtacatcttggccattccttcaagcaaatgagataaaccagactcactctttaatgcctgcataagctattgtgactgtagaaaagacggagaatgtctgggtttgaggatatgtgggaggggtggggagaaggagtagagaagggctaaggcatgcatgttgttttaggtgtgtttgagatgcctgaagaacatcagtgtatccccctaatttctgtcatgttactcaaaccagacacattgtggccatttctttttcctttatcattcccacgtccggccactgccccattcctttttgttccgtagtagaccctcaatatatatgtgtgtgttggtaaatggccatacacagcagggtattttttattattattttcagttccctcagcgcgtttaccacaaagctgtgcatataggtggcaccatatatggcgtaccttgacctcgaagagaatctacatggacttttatggacctacgtacacaattttagaaatcataataaatgaatgctggagtcctcaagaccccttccagatttgatttgctaggaagactcacaggactcagcattttgtcatactcaatggctatgatttaccacaccgaaagaatccagagcaaactcagcaaaaggctcaaacccaagtccagaggaaaccaggcacaatctttgagaatcttaatgaaatcacacaggatgtgcttcattgaagctccatctgggacttaaaacaacacacgtgagatgtgttccaggaagtcgtcttgagcacccattgctcagagtttatattggacttgctttctagcacataccacaattgtagacctccagaagaacaggaggtgttcagcgtaagacaatttaggcacacggagctacttctcattactgggaacaatgggaaacttcccaaaacctaaagtacagactccagccaaggatgaaccttgcaagatcaaagaatagcagtctctggcctgctctgttctctttttcacagtaacttaaatggaaaaatgctgagttagcttaagtttctgtaacaaacattaagcaaataaaattttctataacagaaataagccatagctttgagatgaaggcttatatacgtgtaaaccattgtaaccaagaaaaaaaaaaaaagtcagagtcacagtgaaaatacttaacaaactagccaggatttaattcagtgatgacagggaacagaggaagtcttgtgagaaaggatcttgcctctgcctagtatctttcacagataggcttcaagtggtttgatttgcagatacaccctttcttggcctttatttcggcaaagatgtgatgggtaggtaaatgccgtgttctttccctagcacgtatgtcagtttctcatccactctttgttcttgctattgaaagttgtagcttctggctacaacagagatagttgaagaatatggagttcgccataatttatcattaaatgtggataatttgagattaaagaatatgttgttgcaggctta

SEQ ID NO: 224 - protein, 627 aa, Homo sapiens
MAMALTDPAQVSVTFDDVAVTFTQEEWGQLDLAQRTLYQEVMLENCGLLVSLGCPVPRPELIYHLEHGQEPWTRKEDLSQGTCPGDKGKPKSTEPTTCELALSEGISFWGQLTQGASGDSQLGQPKDQDGFSEMQGERLRPGLDSQKEKLPGKMSPKHDGLGTADSVCSRIIQDRVSLGDDVHDCDSHGSGKNPVIQEEENIFKCNECEKVFNKKRLLARHERIHSGVKPYECTECGKTFSKSTYLLQHHMVHTGEKPYKCMECGKAFNRKSHLTQHQRIHSGEKPYKCSECGKAFTHRSTFVLHNRSHTGEKPFVCKECGKAFRDRPGFIRHYIIHSGENPYECFECGKVFKHRSYLMWHQQTHTGEKPYECSECGKAFCESAALIHHYVIHTGEKPFECLECGKAFNHRSYLKRHQRIHTGEKPYVCSECGKAFTHCSTFILHKRAHTGEKPFECKECGKAFSNRADLIRHFSIHTGEKPYECMECGKAFNRRSGLTRHQRIHSGEKPYECIECGKTFCWSTNLIRHSIIHTGEKPYECSECGKAFSRSSSLTQHQRMHTGRNPISVTDVGRPFTSGQTSVNIQELLLGKNFLNVTTEENLLQEEASYMASDRTYQRETPQVSSL

SEQ ID NO: 225 - DNA, 2899 bp, Homo sapiens
agattctcgcaaatctggaagcggatcgcgtggagtgacggtcacaccgcggcgaattaatttccaaagactcatgttacatgagaaagccaccaagaagaccaaagaaaaggagacaaggatggctcttcctcagggatgcttgactttcagggatgtggctatagaattctctttggaggagtggaaatgcctgaaccctgcacagagggctttatacagggccgtgatgttggagaactacaggaacctggagtctgtgggattgacttctaaggactcttggtacatgaggaagaaacccggaaggggaagaggaaagcaaaggcgtcaggaatggttcttcctcagggtctattgacattcagggatgtggccatagaattctctcaggaggagtggaaatgcctggaccctgctcagaggactctatacagagatgtgatgttggagaattataggaacctggtctccctgggtattttttctaaatgtgagatcaaggaattaccaccaaaaaaggagagtaatacaggagaaatattccagacagtaatgttggaaagacatgaaagccacgacatacaagatttttgcttcagagaaacccagaaaaatgtacatgactctcagtgtctgtggaaacatgattgaagacattataagcgagtgcgtgtgacctataaggaaagtctcattggtagaagagacatgcatgggagaaaggatgatgcacaaaagcagcctgttaaaaatcagcttggattaaacccgcagtcacatctaccagaactgcagctatttcaagctgaagggaaaatatataaatatgatcacatggaaaaatctgtcaacagtagttccttagtttccccaccccaacgtatttcttctactgtcaaaacccacatttctcatacatatgaatgtaattttgtggattcattattcacacaaaaagagaaagcaaatattgggacagaacactacaaatgtagtgagcgtggcaaggcctttcatcaaggcttacattttactatacatcaaataatccatactaaagagacgcaatttaaatgtgatatatgtggcaagatcttcaataaaaaatcaaaccttgcaagtcatcaaagaattcatactggagagaagccatataaatgtaatgaatgtggcaaggtcttccataatatgtcacaccttgcacagcatcgcaggattcatactggagagaaaccatataaatgtaatgaatgtggcaaggtctttaatcaaatttcacaccttgcacaacatcaaagaattcataccggagagaaaccttataaatgtaatgaatgtggaaaggtcttccatcaaatttcacaccttgcacaacatcggacaattcatactggagaaaaaccttacgaatgtaacaaatgtggcaaggtgttcagtcgcaattcctaccttgtacaacatctgatcattcatactggagagaaaccttacagatgtaatgtatgtggaaaggtcttccatcatatttcacaccttgcacaacatcagagaatccacactggagagaaaccttacaaatgtaatgagtgtggcaaggtcttcagtcacaagtcatccctagtaaatcactggagaattcatactggagagaaaccttacaaatgtaatgagtgtggcaaggtcttcagtcacaagtcatccctagtaaatcactggagaatccacactggagagaaaccttacaaatgtaatgaatgtggcaaggtcttcagtcgcaattcataccttgcccaacatctgataattcatgccggtgagaaaccttataagtgtgatgaatgtgacaaagcattcagtcaaaattcacatcttgtacaacatcacagaatccatactggagagaaaccttacaaatgtgatgaatgtggcaaagtcttcagtcaaaattcataccttgcatatcattggagaattcatactggagaaaaagcttataaatgtaatgaatgtgggaaggtcttcggtctaaactcatccctagcacatcatcggaaaattcacactggagagaaacctttcaaatgtaatgaatgtggcaaagcttttagtatgcgttcaagcctcactaatcatcatgcgatccacactggagagaaacatttcaaatgtaatgaatgtggcaaactcttccgcgacaattcatatcttgtacgtcatcagagatttcatgccggaaagaaatctaacacatgtaattaatgtggcagagtgttcagttagcattaaagccttgtaagacatacaataatttatactggagaaaaactttgcaagtataatgaatgtagcagagcctttagtttttgttcaaggcttaataaccgttagctagaccatagaggacagaaactttactaatgtactgaatgtggcaaggtcttaaggtaaaatctgagaccaggattcttcaaagaattcttgctggtgagaaacctaacaaatgtaatgaatgtggcaaggtcttctggcacaattctcacattgtacaatattgcaaaaattcatgcttgagagaaacaaaaacactgagagtgggaaaccattatgacttcaaacattcatcaacatcagagaatccatactaaagagcatttataataattatatgtgatagagattttccgcaggccaaagtctcactaggcatcaaaaacttttttgatgaaaccatacaaatgtaacgtgcatgcttaagcttttacccaggcatcaaaaccggaacatcacagggtttatactggagagtaactacacaaagataatgtaataagcctttcagtgtaatattcatgattttgtcgtgagagatccactcaataaaaaccaggcaaatgta

SEQ ID NO: 226 - protein, 516 aa, Homo sapiens
MHGRKDDAQKQPVKNQLGLNPQSHLPELQLFQAEGKIYKYDHMEKSVNSSSLVSPPQRISSTVKTHISHTYECNFVDSLFTQKEKANIGTEHYKCSERGKAFHQGLHFTIHQIIHTKETQFKCDICGKIFNKKSNLASHQRIHTGEKPYKCNECGKVFHNMSHLAQHRRIHTGEKPYKCNECGKVFNQISHLAQHQRIHTGEKPYKCNECGKVFHQISHLAQHRTIHTGEKPYECNKCGKVFSRNSYLVQHLIIHTGEKPYRCNVCGKVFHHISHLAQHQRIHTGEKPYKCNECGKVFSHKSSLVNHWRIHTGEKPYKCNECGKVFSHKSSLVNHWRIHTGEKPYKCNECGKVFSRNSYLAQHLIIHAGEKPYKCDECDKAFSQNSHLVQHHRIHTGEKPYKCDECGKVFSQNSYLAYHWRIHTGEKAYKCNECGKVFGLNSSLAHHRKIHTGEKPFKCNECGKAFSMRSSLTNHHAIHTGEKHFKCNECGKLFRDNSYLVRHQRFHAGKKSNTCN

SEQ ID NO: 227 - DNA, 6811 bp, Homo sapiens
gcgggcgcgcgggcgcgactcggcggcggcgtctttttccacagatcctggtccctacaaataagcctgctcatgtgagataagaaaggagttcctggaaccaggaattcattctcagtgtagaagacctagctgagacctcactccacagttttggggcagaagcagaagagacgcacagtagaaccgatctcagccttgctgatcatctcgtacagcagcagaaaatgaccatgttacaggagtcattctcatttgacgatttatctgtggacttcacccaaaaggagtggcagctactggatccctctcagaagaatttatacaaggatgtgatgttggagaactatagcagcctagtgtcactggggtatgaagttatgaaaccagatgtcatcttcaaattggagcaaggagaagagccgtgggtaggagatggagaaattccaagttcagattctccagaagtctggaaagtagatggtaacatgatgtggcaccaggataaccaagacaagcttaaaattataaaaagaggtcatgaatgtgatgcatttggaaaaaatttcaatctgaacatgaactttgttcctttaaggaaatcaaacagtgaaggtgacttagatggattgattttaaaacatcatttagatttgcttattccaaaaggagattatggaaaagcagaatcagatgactttaatgtgtttgataatttttttctccattccaagcctgaggatactgatacctggttaaaatactatgactgtgataaatataaagagagctataaaaagtcacagattatcatatatcatagaaatcgtttaggggagaaactctatgaatgcagtgaatgtaggaagcgcttcagtaagaaaccaagtctcattaaacatcagagcagacatataagagacatagcctttggctgtggtaattgtggcaaaacctttccccagaagtctcagtttattacacatcacagaactcatacaggagaaaaaccttataattgtagccagtgtgggaaagccttctcccaaaagtcacagctcacatcccatcagcggacacatacaggagagaaaccttatgagtgtggtgaatgtgggaaagccttctcccggaagtcacatctcatatcgcattggagaacacacacaggagagaaaccctatggatgcaatgaatgtgggagggcctttagtgaaaagtccaatctcattaaccatcagagaattcataccggtgagaagccttttgaatgcagggaatgtgggaaagccttcagcaggaagtcacaactcgttacacatcacagaactcacacaggaacaaaaccctttggatgtagtgattgtagaaaagcattctttgagaagtcagagcttattagacatcagacaattcatactggagagaaaccctatgaatgcagcgagtgtaggaaagcatttagagagaggtcgagtctcattaatcatcagagaacacatacaggagagaaacctcatggatgcattcagtgtgggaaggccttctcccagaagtcacatctcatatcacatcagatgacacacacaggagaaaaaccctttatatgcagtaaatgtgggaaagccttcagcaggaaatcacagctcgttagacatcagagaactcatacgggagaaaaaccgtatgaatgcagtgagtgtgggaaagctttcagtgaaaaattaagtctcactaatcatcaaagaattcatacaggagaaaaaccatatgtatgcagtgaatgtgggaaagccttttgtcagaagtcacatctcatatcacatcagaggacacatacaggggagaaaccctatgaatgcagtgaatgtgggaaggcctttggtgagaagtcaagtcttgcaactcatcagagaactcatactggagaaaaaccgtatgaatgcagggactgtgaaaaagctttctcccagaaatcacagctaaatacccatcagagaattcacactggagagaaaccctatgaatgcagtctttgtaggaaagctttttttgagaagtcggagctaattagacatctgagaactcatacaggagaaaaaccttatgaatgcaatgaatgtagaaaagccttcagggagaagtcaagtctcatcaatcatcagagaatacatacaggagagaagccttttgaatgcagtgagtgtggcaaagctttctctcggaagtcacaccttataccacatcaaaggacacatacgggtgagaaaccctatggatgcagtgaatgtaggaaggccttctctcagaagtcacagctggttaatcatcagagaattcatacaggagagaagccttatcgatgcattgaatgtgggaaagctttctcacagaagtcacagctcatcaatcatcagagaactcatacagtaaaaaaatcctaggaatacagttaatagtagtctttgacagatcatcttggacttcaggaaatgcaattatgataacgtttgtagacagtcacgtcatgttaggtgtttgtactccatgaggatgagaactctaaatgaggtggtgtatggaaagccgatcataattcatagagtagagtgaacctatgactgcagtggatctcaaaaacttttaaaaccatagacaagccttatagagtagaacattcacagcaaagaagaatcctgtgaatgtccaaaagccttccagaagtcaagtctcttaagctattagaaatattcccactggggatgagggaaaaccccatgaatgcgggaaatgaggcaatatttttaagaaatgacagttcattgtacataagaaaatgctcttaggaatgaagttctatgaaagtactaaatatgggacagtgcaacaagtaacgagactattttgtattttggagaattcatattatggagaacctaacaatttaaagacactgggaacacttgcccctcagtatagtactgtcaagggaagccatacactttttgtagacatgggtaccaaaaatacccaattctaagtggttgacagatgttcactttgaagtgtgaagttttaaaaatacgtgaataaattggttattgaaacatctaagacatttcttagtggtatttgtggcttatcttctagtgtcacgtatgttttgtgttttggacttacctataatttaatgtaattgggagtatgaaatgcatatgccttttagtgcctctgatgtctgtgaagacaacactacacaccactggtttttattttttaacaataatataaaaaatggaaactcatgtaacatgactacatgaataagtaccttaagtgataacccgtttcttttaacttatagacatacataaggggtcttttgtttttatggacctttctattcagtaactgaagccaacattgtgtaagtcttctgcatcctcagagtctgagtaacagtttatataaaataaatatgcaaaggcaggaaccacagaataaccatagtaatatataactgaatgagcaaaataaaggtgtgtgaactacattacaacacccaaactaaatgaaataaagtagtgctgtattaaatctttttctcatttagtgaggtgcctccatatagtatatatatatgtatcttaagtgatatgtaacccaaatgtcactattttaatttactgtgataaagtatcatggatattttgtgctgctgttatgctttttgtgttgcataaaatatcttgtaaaaattagatggataaatgaattattaaaaaatcacatttctgaagatgtaaagtattagggaattttgtgctggaaaaacatttttgacattcaaggatgcctattttatcttctagcaaatttctgtggtccctggaaaagtacagatgatcctggacttacagtggggttacctcccaataaacccattgtaagttgaaaacattgtaagtcaaaaatgcatttaatacacccaacttaccaaacatcatagcttagcgtagcctaccttaaacattctcagaacacattctaatgcatcatctattttataaaaaggtgttgaatatctgatgtaattattgaatactgaaggtgaaaaatagtagtgtatggataccattgtaatgttgagaaactgtaagtcacatcctcttaagtcaggaactatctgtataaggaaacaagatttccattttatcatttgaaatgtatttgactttgtttcactagttgcattatccccatggaaaacttcacattgagaacttaccattatatatttccataaaaatgcatgaaccatcccttagctaagtaaggattttgtaatgttctctcaataatgttgcttggcaaagttaatattttttgtatgctgatgaaatttagaaaagtccaatattgagcttgattgcaaacttagaaaaactcaagacttctccttttatgttcaaattgttgtatcagtatggtattttgcacctttaccttaaacaatattttctcctttaattattgattttgcaacattttgggaaagttggaattttaaataaatgaataattttctaaaccagaataccagttcaacagccaaataattctgtctttccatgctgtaattttaaagcatttaattttccaactttttgttcatactcaagtgtatgaacttcctggctgggcacagtggctcatgcctgtaatcccagcactttgggaggctgaggacctcaagtggagacctcaagtggatcacttgaggtcaggagttgaagaccagcatgttcatggccaacatggcaaaaccctgtcttaaattagccgggcatggttgtgcgtgcctgtaatcccagttactcaggaggctgaggcaggagaatcacttgaacctgagaggcagaggttgcagtgagccaagattgtgcagcctgggcgacagagcgagcctctgtcaaaaaaagaaaagaaaaagaacttcctactttttaatatctcaaattcattttactagacgtgggagaccaactaatgcaaatgaacagttacagggtgatgttgtactttgtgatttttgccctattttttctttccatctatcaccattctctttccaatcccagagattgatttattaggtcttggaaattctagattattccattaactattaagcagttaaacctgatacttcctacactagataatggaacttcaacattagcctattgattgcccaagaacaaacatttttttctaaatgtcaggtgttatggggaggattgatgctgacagcagaggtctagttaaaaactgatgcagaggttcaaatacgttgtgcagtaatcactagaactcaccttctaaagtgtcatgagagctctgattctgcaattagagattttttaatgtgtttttgaaattaccttgtaaaccacaaatctgtgtctctgcattgccccttattgtttcctaccacaaattctacatcaagaagaaagttttaaagttagactggatttatttgtgattttatggagcacaataaggtacattgagatagcatactaaaggaggccaaatacaggaagcatcatcttttcttattctcttactgcctggattttcccactgacctggaattgtgcacagttctacaaaggacaattgacattgttttccttttactaagtagtgggttttccttaaggtccagactgaattttgagacctgtatcaggattgccttctgtgtgactttttcttgcaggatctgacatcattacctatgggtccatatatttgtgatactttggtttcgggaacatcacttttagaatgttgacataaaatgcacccacagaatgccgtatttatcaaaagtaactttctagcaaaatctacagcagtaggcatttggaatctgcatttgagacctctgcagtcatttggtcattccagcaatctatgtccaggttgtcaatttcagaggtcttattagtctatacaggtaccaatgagctttcagatgttcaacacctacccctggcctaactgctgataaccaaccataacccttgcagatgcatgcatgttttctgcaccttgctatcatttttcagtccatttttcacatgtatacatagtgattatttttaaatgcaaccctgatttcacatgcctcatgttgaaatatcgtgtggcttattgtggacttaaagtgtaacattctccttatggtatgtaaggacttttgtataaaccaatgcctatctatctatcatttctgaaaactttttcctcctatgcaatattttctggcctctgtgaacaacttgtagttccttgagatttctattatcacttatgtttttgcaaatctgcaattgaaatgcccttgttccttgttaatgcctattgaatctatatgaacctgtacgtgtgtttctcactgtgataatataatcattgcatgttttatctttcccactagaaagcttctagaaagctagtactatcttttttgtctgtgtaatttttgcatcacaagctatatttaaatgtgggtgcagtgagtggctgttttctgccacatggagaaacatggtctgcagtgagagagaagaatgaagccatgatgaaagcaaaatcaagaaagagtcccgattgtgttccagtacctggttcttctggtcttcatgttcaggtccacctctgcccttttcatgtcttgattgttgaattcttctgtgagatactccaaatatcctaataaattctcatgtttgcttca

SEQ ID NO: 228 - protein, 738 aa, Homo sapiens
MTMLQESFSFDDLSVDFTQKEWQLLDPSQKNLYKDVMLENYSSLVSLGYEVMKPDVIFKLEQGEEPWVGDGEIPSSDSPEVWKVDGNMMWHQDNQDKLKIIKRGHECDAFGKNFNLNMNFVPLRKSNSEGDLDGLILKHHLDLLIPKGDYGKAESDDFNVFDNFFLHSKPEDTDTWLKYYDCDKYKESYKKSQIIIYHRNRLGEKLYECSECRKRFSKKPSLIKHQSRHIRDIAFGCGNCGKTFPQKSQFITHHRTHTGEKPYNCSQCGKAFSQKSQLTSHQRTHTGEKPYECGECGKAFSRKSHLISHWRTHTGEKPYGCNECGRAFSEKSNLINHQRIHTGEKPFECRECGKAFSRKSQLVTHHRTHTGTKPFGCSDCRKAFFEKSELIRHQTIHTGEKPYECSECRKAFRERSSLINHQRTHTGEKPHGCIQCGKAFSQKSHLISHQMTHTGEKPFICSKCGKAFSRKSQLVRHQRTHTGEKPYECSECGKAFSEKLSLTNHQRIHTGEKPYVCSECGKAFCQKSHLISHQRTHTGEKPYECSECGKAFGEKSSLATHQRTHTGEKPYECRDCEKAFSQKSQLNTHQRIHTGEKPYECSLCRKAFFEKSELIRHLRTHTGEKPYECNECRKAFREKSSLINHQRIHTGEKPFECSECGKAFSRKSHLIPHQRTHTGEKPYGCSECRKAFSQKSQLVNHQRIHTGEKPYRCIECGKAFSQKSQLINHQRTHTVKKS

SEQ ID NO: 229 - DNA, 3877 bp, Homo sapiens
acacccggaagcagatcgcgctggggaaaggccacgtcgctatgagtgtgtttcagtctacctggattaaacgtttgcttctcttcgtctaccttgattaaacgtgcacttcgcagtcctcggttctccatacccgtgacctggggatcgctacggaccttaaaatacccgcaacagccccttcgtcccaagctggagagcagtggcatgatctcggctcactgcagcttctacttcctggcctcaagcagtctttccacctcagcctctcaacgcactggaattacagatgtgagccaccacactaggcctacaagtggtccttacaccagattaatttatcttgaaatggcgggcaactgaatcgcacacctcaatctatgatttgacttttaaagaattaattatattgactgagagagaggcccaggagagaaagaagaaagaaaaggagccagggatggctcttcctcagggatctttgacattcagggatgtggctgtagaattctctcaggaggagtggaaatgcctggaccctgttcagaaagctttgtacagggacgtgatgttggagaactacaggaacctcggcttcctgggactctgtcttcctgacctgaatattatctccatgttggagcaagggaaagagccctggactgtggtgagccaagtgaaaatagcgaggaacccaaactgtggggaatgcatgaaaggcgtgatcaccggtatctctcctaaatgtgtgatcaaggaattaccaccaatacagaacagtaacacaggagaaaaattccaagcagtgatgttggaaggacatgaaagctatgacactgaaaatttttacttcagggaaatccggaaaaatctacaggaagttgactttcaatggaaagatggtgaaataaattataaagaagggccgatgacccataaaaacaatcttactggtcaaagagttcgacatagtcaaggggacgtagaaaacaagcatatggaaaatcagcttatattaaggtttcagtccggtctgggtgaattgcagaaatttcaaactgcagagaaaatttatggatgtaatcaaattgagaggacagttaataattgttttttagcttcaccacttcaaagaatttttcctggtgtccaaaccaacatttctaggaaatatgggaatgattttttgcaactttcgttacctacacaagacgagaaaacacatattagggaaaaaccttacataggtaatgagtgtggcaaagccttcagagtgtcttcaagtcttattaatcatcagatgatacatactacagagaaaccttacagatgcaatgagtctggtaaagcctttcatcggggctcactactaacagtacatcagatagtccatacaagagggaaaccataccaatgtgatgtatgtggcaggatcttcagacaaaattcagatcttgtaaatcaccggagaagtcacactggagacaaaccctacatatgtaatgaatgtggcaagtcctttagtaaaagttcccaccttgcagttcatcagagaattcatactggagagaaaccttacaaatgtaatcgatgtgggaagtgctttagtcaaagttcctctcttgcaactcatcagacagttcatactggagacaaaccctacaaatgtaatgaatgtggcaaaacctttaaacggaactcaagcctcactgcacatcatataatccatgcaggaaagaaaccatatacatgtgatgtatgtggcaaggtcttttatcagaattcacaacttgtaaggcaccagataattcatactggagagacaccttacaaatgtaatgaatgtggcaaggtcttctttcaacgttcacgtcttgcagggcaccggagaattcatactggagagaaaccctacaaatgtaatgaatgtggcaaggtcttcagtcaacattcacatcttgcagtgcatcagagagttcatactggagagaaaccttacaaatgtaatgaatgtggcaaagcctttaattggggctcattactaactgtacatcagagaattcataccggagagaaaccttacaaatgtaatgtgtgtggcaaggtctttaattacggtggatacctttcggttcatatgagatgtcatactggagagaaacctctccattgtaataaatgtggcatggtcttcacttactattcatgcctagcacgtcatcaaagaatgcataccggagagaaaccttacaaatgtaatgtgtgtggcaaggtcttcattgacagtggaaacctttcaattcataggcgaagtcataccggagagaaacctttccagtgtaacgaatgcggcaaggtcttcagttactactcatgcctagcacgtcatcggaaaattcataccggagagaaaccttataaatgtaatgattgtggcaaagcctatactcagcgttcaagcctcactaaacatctggtaattcatactggagagaacccttaccactgtaatgaatttggtgaggcttttatccaaagttcaaaacttgcaagatatcacagaaatcctactggggagaaaccacacaaatgtagtgaatgtggtagaacttttagtcataaaacaagtctggtgtaccatcagagaagacatactggagagatgccatacaaatgtattgaatgtgggaaagtctttaactccactacaaccctggcaaggcatcggagaattcatactggagagaaaccttacaaatgtaatgaatgtggcaaggtcttccgttatcgctcaggcctcgcacgtcattggagtattcatactggagagaaaccttacaaatgtaatgagtgtggcaaagcctttagagtacgttcaattctgcttaatcatcagatgatgcatactggagagaaaccttataaatgtaatgaatgtggtaaagcttttatcgaaaggtcaaacttggtttaccatcagagaaaccatactggagagaagccatacaaatgtatggaatgtggcaaggcgtttgggcggcggtcttgcctcactaaacaccaacgaattcattctagtgaaaaaccttataaatgtaatgagtgtggcaaatcttacattagtcgctcaggcctcactaaacatcagataaaacatgctggagagaaccttacaactaaactcaatgtggaaaggccgttagatgttgtcctaacctctgggatccccaaataatttatacttactcatatagcttgtatatttgtcctttccctttgaagtctcatgtggaattgtagtaatctccagtattggaggtggagcctagtgggaggtgattggatgatgggggtggctttctcaagaaagttttagtaccatccccttgttgctgtccttgtgatagttctcatgaggtctggctcatgcctgtaatcccagcactttgggaggctgaggtgggcggatcacttgaggtcaggagttcaagagcagcctggccaacatggtgaaaccctgtttctgccaaaaatacaaaaattagctgggcttcgtggcgggtactggtagtaccagctactcgagaggctgagtcaggagaattgcttgaaccctggaggcggaggttgcagtgagccgagatcgcgccactgcactctagcctgggtgacagagtgagactccatcacgcacacgcacgcacgaaagtgaatggcacctccctcttgtttgttcttctggccatgtgacatgcccttcacctcccaccatcattttaaccttcctcaggtttcccgagagggtgaacagacgtcagcgccatgtttcctataaagcctgcaaaattgtgagtcaattaaacctctttatacatta

SEQ ID NO: 230 - protein, 924 aa, Homo sapiens
MALPQGSLTFRDVAVEFSQEEWKCLDPVQKALYRDVMLENYRNLGFLGLCLPDLNIISMLEQGKEPWTVVSQVKIARNPNCGECMKGVITGISPKCVIKELPPIQNSNTGEKFQAVMLEGHESYDTENFYFREIRKNLQEVDFQWKDGEINYKEGPMTHKNNLTGQRVRHSQGDVENKHMENQLILRFQSGLGELQKFQTAEKIYGCNQIERTVNNCFLASPLQRIFPGVQTNISRKYGNDFLQLSLPTQDEKTHIREKPYIGNECGKAFRVSSSLINHQMIHTTEKPYRCNESGKAFHRGSLLTVHQIVHTRGKPYQCDVCGRIFRQNSDLVNHRRSHTGDKPYICNECGKSFSKSSHLAVHQRIHTGEKPYKCNRCGKCFSQSSSLATHQTVHTGDKPYKCNECGKTFKRNSSLTAHHIIHAGKKPYTCDVCGKVFYQNSQLVRHQIIHTGETPYKCNECGKVFFQRSRLAGHRRIHTGEKPYKCNECGKVFSQHSHLAVHQRVHTGEKPYKCNECGKAFNWGSLLTVHQRIHTGEKPYKCNVCGKVFNYGGYLSVHMRCHTGEKPLHCNKCGMVFTYYSCLARHQRMHTGEKPYKCNVCGKVFIDSGNLSIHRRSHTGEKPFQCNECGKVFSYYSCLARHRKIHTGEKPYKCNDCGKAYTQRSSLTKHLVIHTGENPYHCNEFGEAFIQSSKLARYHRNPTGEKPHKCSECGRTFSHKTSLVYHQRRHTGEMPYKCIECGKVFNSTTTLARHRRIHTGEKPYKCNECGKVFRYRSGLARHWSIHTGEKPYKCNECGKAFRVRSILLNHQMMHTGEKPYKCNECGKAFIERSNLVYHQRNHTGEKPYKCMECGKAFGRRSCLTKHQRIHSSEKPYKCNECGKSYISRSGLTKHQIKHAGENLTTKLNVERPLDVVLTSGIPK

SEQ ID NO: 231 - DNA, 7712 bp, Homo sapiens
gtgccgatttagctgccgccgcgccttggagtcctgaggaacttggctaggctggccccgagcggaaccagagaatgctgaggctctaaccatggaatattcggaatgtcccattctatgaaggaggtttgctggctgcaacaggaatattcatgaacatggaggggttggtcatgttccaggatctgtctatagacttctctcaggaggaatgggagtgcctggacgctgctcagaaggacttatacagagatgtaatgatggagaactacagcagcctggtctcactaggtctctctatcccaaagcctgatgtgatttccttactggagcaagggaaagagccctggatggtttcaagggacgtgctgggaggatggtgccgagactcggagtttagatgtaagaccaaagattcatgtttgccaaaagaaatctatgaagtaacatcatctcagtgggtgagaatggaaaaatgtcatagccttgtgggctccagtgtcagagatgactgggaatgcaaaggccagtttcagcaccaagatataaatcaggagcgatatttggaaaaagcaataatgacttatgaaacaacaccaactttctgcctacagacatctctcactctgcatcatcggattcatcctggagagaaactgtataaatccacagaatgtatggcttttaagtatggctcagaacttacacaacagcaagaaacccatactggtgaaaaactctataaatgtaaggagtgtgggaaggcctttcatcacttttcctatcttgttaaacatcagagaattcatactggggaaaagccctgtgcatgtaaagaatatggaaaagcttttatttctggctcacatcttattcaacaccagaaaatgtatacagatgagagacctcatgagtgtcaggaatccgtgaaggcctttagaccgtctgcacatcttattcaacattggagaattcatactggtgacaaaccttatgaatgtaaagaatgtgggaaatcttttacttctggctcaacactaaatcaacatcagcaaattcacactggtgagaaaccctatcattgtaagcaatgtggaaaatcttttactgttggctcaacactaattcgacaccagcaaattcacactggtgagaaaccgtatgattgtaaggaatgtggaaaatcttttgcttcaggctcagcactaattcgacatcagcgaattcacactggtgagaaaccctatgactgtaaggaatgtggaaaatcttttacttttcactcagctctaattcgacatcagcgaattcacactggtgagaaaccctatgattgtaaggaatgtgggaaatcttttacttttcgctcagggttaattggacaccaggcaattcacactggtgagaaaccctatgattgtaaagaatgtggaaaatcttttactgctggctcaacactaattcaacatcagcgaattcacactggtgagaaaccctatgattgtaaggagtgtgggaaatcttttgcttcgggctcagcactacttcaacatcagcggattcacactggtgagaaaccctattgttgtaaggaatgtggaaaatcttttacttttcgctcaacacgcaatcgacaccagcgaatccacactggtgagaaaccctataattgtaaagaatgtggaaaatcttttgcttctggctcagcactacttcaacatcagcgaattcacactggtgagaaaccctatcattgtaaggaatgtggaaaatcttttacttttcgctcagggctaattggacatcaggcagttcacactggtgagaaaccctatgattgtaaagaatgtggaaaatcttttacttctcgctcagcactaattcaacatcagcgaattcacactggtgagaaaccctatcactgtaaggaatgtggaaaatcttttactgttggctcaacactacttcaacatcagcaaattcacactggtgagaaaccttatgattgtaaggaatgtgggaaggcctttagacttcgtttacgacttactcaacatcaacaaatccatactggtgagaaaccttatcaatgtcaggaatgtgggaaagcctttgtcagtgtctcaggactcacccaacatcacagaattcacactggtgagaaaccctatgaatgtccggactgtgggaaggcctttagacagcgtacataccttaatcaacatcggagaattcatactggtgagaaaccttatgaatgtaaagaatgtgggaaatcttttactttctgctcaggactaattcaacatcagcaaaatcacactgatgagaaaccctatgatggtaaggaatgtgggaaatcttttacttctcactcaacactaattcaacatcagcaaattcacactggtgagaaaccctatgattgtaaggaatgtgggaaatcttttacttctcactcaacactaattcaacatcagcaaatacacactggtgagaagctctatgattgtaaggaatgtgggaaatcttttacttctcattcaacactaattcaacatcagccacttcacactggtgagaaaccttatcattgcaaggaatgtgggaaatcttttactcttcgctcagcactaattcaacatcggccagttcacactggtgagaaacgctacagttgtaaagaatgtgggaaatcttttacttctcgctcaacactaattgaacatcagcgaattcacactggtgagaaaccctatcattgtaaggaatgtggaaaatcttttgcttttcgctcagcaataatccaacatcggcgaattcacactggtgagaaaccctatgattgtaaggaatgtggcaaggcctttagacgtcgttcaaaacttactcaacatcaacgaatccatactggtgagaaaccttatcgatgtcatgaatgtggaaaagcctttgtccgtttctcaggactcaccaaacatcacagtattcacactggcgagaaaccctatgaatgtaagacatgtgggaagtccttcagacagcgtacacaccttactctacatcagagaattcataccggtgacagaccttatgaatgtaaagaatgtgggaaatcttttacttgcggctcagaactaattcgacatcagcgaactcacactggtgagaaaccttatgattgtaaggaatgtgggaaggcctttagatgtccttcacaacttagtcaacataaacgaatccatactggtgagaaaacttatcaatgtccggaatgtgggaaagcctttttctatgcctcaggactcagccgacatcagagtgttcacactggcgagaaaccctatgaatgtaagacatgtgggaaggcctttaaacagcttacacagcttactcgacatcagagaattcatgacctaacataattaatgtaggaaactgttctcatgccatttgtcatggatcatcagcagattccatatgtgggtcaaatacaatggatgtgtattacttcatattcactttttccagaattacgacttttttttttttttttgagacggagtcttgctctgtcgcccaggctggagtgcagtggcgctatctcggctcactgcaagctctgcctcctgggttcatgccattctcctgcctcagcctccctagtagctgggactacaggtacctgccaccacgcctggctaatttttttgtttttgtatttttagtagagacagggtttcactgtgttagccaggatggtctcgatctcctgacctggtgatccacccaccaaaattaggacatttaatactgaaagaaattgataatgaatgtagatgagttttctatcatgattcaaagcttattgaagttatacaaattcatattagagaatgtggtcaatgacaaaagacaaccatttactacctacgtgacattaggctagttatgtaaattctctgtgccaaaattactaattgataaaatgttgatggcaatagttgtttttgtgtattttttgtttgtttgttttgttttgagacagagtcttgctctgttgcccaggctggagtgcagtggtgctatcttggctcactgcaacctctgcctcctgggttcaagtgattctcctgcctctgcctcctgagtagctcagattacaggcatgcaccaccatgcttggctaatttttgtatttttagtagagacggggtttcactgtgttggtcagggtggtctcaaacttttgacctcgtgatccccctacctcggcctcccaaagtgctgggattacaggtgtgagccaccacgcctggctagtaatagtttttttataataaataagtgtgactatatttttcatgtttgactactgactttgttttaagcttcgccttccctgtctatttccctgtctactttagcccataactgcaaaggtggctaagaaagtccttgctggaaagaaagcaagcaaaactaaagtctgtgcgcaccttctcctttggatccagtgggcaatttatattagaaattccaagccgggcgtggtggctcacgcctgtaatgccagcactttcggaggctgaggtgggtggatcacctgaggttaagagttcaagaccagcctggccaacatgttgaaaccccatctctactaaaaatacaaaatcagccagacatggtggcatatgcctgtaatcccagctattcaggaggcaaggctggagaatcgcttgaacctgggaggcggatgttgcagtgagccagtcagtggagcagtcagaacacacacagtgtttatcaattaagtttgtagtcagaacacacaccatgtttatcaattaagtttgctgtcttatatggacacagtttgtgatgccctaaaacaagtagtggtgcctaagataatcataggccaccataacagatataacaacaatgagaaagttgaaatattgttgggatcatccaaatatgacacagatacaaagtgagcacatgctggtgaataaatggagccaatagacttgttcactgcatggttacgtcagaggcgtgtaaaccagagcaacttcttcttgaataggagctgtgtaaagtaacactgaaacctactggactgcattcctagacagataagtcattctaagtcacaagatgagatatgaggtcagcataagatacaggtcataaagaccttgctgagaaaacatcttgcagtaaagaagtcggccaaatccaagatggtgacaagagtgacctctggtcgtcctcactgctatactcccagcagcaccatgacacccagctaagtttttattttttatttcagtagagttggagtcttgctttgttacccaggctggtcttgaattcctgtcttcaagcaatcttcccaccttatgaatataaagaatggcccaccttgtcctctcaaagtgctgggattacaatcatgagccactgcacctgggactttctttttcttttttcttttttttttttttgagatggagttttgctcttgttgcccaggctggagtgcaatggcacgatcttggctcactgcaacctccgcctcccaggttcaagcgattctcttgactcagcctcctgagtaactgggattacaggcatgctccaccatgcccgactaatttttgtattatttagtagagacggggtttctccatgttggtcaggctggtctctgaactctgggcaggactaatttagataaggtagtcaggaaaggcatttcttacaaggtggtatttgcatgaatgtagacatatggttgcattttattatatgtaaattacacttcaataaagttgatgaaaaaaatcttacctcatcgtctatgcacttcggattgttgtatttcattctatttaaattacacttgcgtttaaaaaatttaacacttctctaaaacatatctgttgatttgtacttttactaatatgcttatggatgatttatatacacacacacacacacacatatcttttaagaaggttattttaaggttaatcaattgaggctttgtctcaattgattttttttgagacagtctcgttctgtcgcccaggctggagtgcagtggcgtgatctcgactcactgcaagctccacctcccaggttcacgccattctcctgcctcagcctccctagtagctgtgactacaggtgcccgccaccacgcctggctaattttttgtatttgtagtagagacggaatttcaccatgttagccaggatggtctcaatctcctgacctcatgacccgcccacctcggcctcccaaagtgctgggattacaggcgtgagccaccccgcccggctcaattgattcttttgtctcaatttgtagtcagttgaggtttgtctcaatttatggaaacaaatcaaatgtttgttctcaaattcttactctgtcatttattattctccatgtttttgtaactgcttccttggagatatttaaacataaatatatacagagagggtgaagatggaggagtgctttttacagttcacagttgtctttttcatgtgtgacaggtttttgctgtgttgcccaggctggagtgcaatgccacaatcttggctcactgcagcctcaacttcccgggctcaatcgatcccccacctcagcctcccgagtagcaaggactacaggcgcacaccaccacacctagctaatttttgtatcttttgtagagacagggtttcaccatgttgtccaggctggtcttgaactcttgggctcaattggtcctagcacctcagcctcctaggtgctgggattacaggtgtgagccactgtgttcagccaatactcttaacgtttttacttttcacttttaaaaattaactctttttatgaaaaaagtagaattttttaaagagcagagaaaagcacaatgaagacagaaagatcacctgtatattcttattgaccaaagatgatctatttggggtaaatccttttttttttttttgagacgggagttttgctattgttgcccaggctggagtgcaatggcacgatctcggcttaccgcaacctctgcctcccaggtttaaacaattctcctgcctcagcctcctgagtagctgggattacaggcatgcaccaccacgcccggctaattttgtatttttaatagagacagggtttctccatgttgaggctgggcttgaactccagacctcaggtgatctgactgcctcggcctcccaaagtgctgggattacaggcaggatccacgtgcccggccggtaaatccttttaatagaggagtttcaatatttctcctctgccatagtattagaaagaaaagaatcattattgacatctttacgacattgagtttttctcttgtacctggtgtgtctttatttcagtaggtattcttttatgtgctttagtaagtctttatatttttagcataaaagtgtacacatttcttgttttacttatttctagatacttaatggcttttgtttataatatgattgggatattttttctgttgtgtaattgattactattactatgtactaaactgttggtttttgtctaaggattgtaacattgatgaactactttagtagatgaaatggtttcttcatgagattgaattgtctaaagagatgttggtattatttgtaaataaaagtatttgcctattcctttc

SEQ ID NO: 232 - protein, 1090 aa, Homo sapiens
MNMEGLVMFQDLSIDFSQEEWECLDAAQKDLYRDVMMENYSSLVSLGLSIPKPDVISLLEQGKEPWMVSRDVLGGWCRDSEFRCKTKDSCLPKEIYEVTSSQWVRMEKCHSLVGSSVRDDWECKGQFQHQDINQERYLEKAIMTYETTPTFCLQTSLTLHHRIHPGEKLYKSTECMAFKYGSELTQQQETHTGEKLYKCKECGKAFHHFSYLVKHQRIHTGEKPCACKEYGKAFISGSHLIQHQKMYTDERPHECQESVKAFRPSAHLIQHWRIHTGDKPYECKECGKSFTSGSTLNQHQQIHTGEKPYHCKQCGKSFTVGSTLIRHQQIHTGEKPYDCKECGKSFASGSALIRHQRIHTGEKPYDCKECGKSFTFHSALIRHQRIHTGEKPYDCKECGKSFTFRSGLIGHQAIHTGEKPYDCKECGKSFTAGSTLIQHQRIHTGEKPYDCKECGKSFASGSALLQHQRIHTGEKPYCCKECGKSFTFRSTRNRHQRIHTGEKPYNCKECGKSFASGSALLQHQRIHTGEKPYHCKECGKSFTFRSGLIGHQAVHTGEKPYDCKECGKSFTSRSALIQHQRIHTGEKPYHCKECGKSFTVGSTLLQHQQIHTGEKPYDCKECGKAFRLRLRLTQHQQIHTGEKPYQCQECGKAFVSVSGLTQHHRIHTGEKPYECPDCGKAFRQRTYLNQHRRIHTGEKPYECKECGKSFTFCSGLIQHQQNHTDEKPYDGKECGKSFTSHSTLIQHQQIHTGEKPYDCKECGKSFTSHSTLIQHQQIHTGEKLYDCKECGKSFTSHSTLIQHQPLHTGEKPYHCKECGKSFTLRSALIQHRPVHTGEKRYSCKECGKSFTSRSTLIEHQRIHTGEKPYHCKECGKSFAFRSAIIQHRRIHTGEKPYDCKECGKAFRRRSKLTQHQRIHTGEKPYRCHECGKAFVRFSGLTKHHSIHTGEKPYECKTCGKSFRQRTHLTLHQRIHTGDRPYECKECGKSFTCGSELIRHQRTHTGEKPYDCKECGKAFRCPSQLSQHKRIHTGEKTYQCPECGKAFFYASGLSRHQSVHTGEKPYECKTCGKAFKQLTQLTRHQRIHDLT

SEQ ID NO: 233 - DNA, 2763 bp, Homo sapiens
gtctctcggtgcagccggagctccaggtctcctcttcactactctgtgtcctgtgctcctacaggcccagcctctgtggccctgtgacctgcaggtattgggagatccacagctaagacaccaggacccctggaagcctagaaatgggaccattgcaatttagagatgtggccatagaattctctctggaggagtggcattgcctggacactgcacagcggaatctatataggaatgtgatgttagagaactacagtaacctggtcttccttggtattgttgtctctaagccagacctgatcgcccatctggagcaaggaaaaaaacctttgactatgaagagacatgagatggtagccaacccctcagttatatgttctcattttgcccaagatctttggccagagcagaacataaaagattctttccaaaaagtgatactgagaagatatgaaaaacgtggacatggaaatttacagttaataaaaaggtgtgaaagtgtagatgagtgtaaggtgcacacaggaggttataatggacttaaccagtgtagtacaactacccagagcaaagtatttcaatgtgataaatatgggaaagtctttcataaattttcaaattcaaatagacataatataagacatactgaaaaaaaacctttcaaatgcatagaatgtggcaaagcttttaaccagttctcaacccttataacacataagaaaattcatactggagagaaaccctacatttgtgaagaatgtggcaaagcctttaagtactcctctgcccttaatacacataagagaattcatactggagagaaaccatacaagtgtgataaatgtgacaaagcctttattgcatcctcaacccttagtaaacatgagatcattcatactggaaagaaaccctacaagtgtgaagaatgtggcaaagcttttaaccaatcctcgacacttactaaacataagaaaattcatactggagagaaaccctacaaatgtgaagaatgtggcaaagcttttaaccaatcctcaacacttactaaacataagaaaattcatactggagagaagccctacgtttgtgaagaatgtggcaaagcctttaagtactcccgtatccttactacacataagagaattcatactggagagaaaccatacaagtgtaataaatgtggcaaagcctttattgcatcctcaacccttagtagacatgagttcattcatatgggaaagaaacattacaaatgtgaagaatgtggcaaagccttcatttggtcctcagtcctaactagacataagagagttcatactggagagaagccctacaaatgtgaagaatgtggcaaagcctttaagtactcctctacccttagttcacataagagaagtcatactggagagaaaccctacaaatgtgaagaatgtggcaaagcctttgttgcatcctcaacccttagtaaacatgagatcattcatactggaaagaaaccctacaagtgtgaagaatgtggcaaagcttttaaccagtcctcatcccttactaaacataagaaaattcatactggagagaaaccctacaaatgtgaagaatgtggcaaagcttttaaccagtcctcttcccttactaaacataagaaaattcatactggagagaaaccctacaaatgtgaagaatgtggcaaagcttttaaccagtcctcaacccttattaaacataagaaaattcatactagagagaaaccctacaaatgtgaagaatgtggcaaagcttttcacctatccacacaccttactacacataagatacttcatactggagagaaaccttatagatgtagagaatgtggcaaagcttttaaccattctgcaaccctttcttcacataagaaaatccattctggagagaaaccatacgagtgtgataaatgtggcaaagcctttatttcaccctcaagccttagtagacatgagataattcatactggggagaaaccctagaagtgtgaagaatgtggcaaagccttcaagtggtcctcacaccttactatacactgagagttctgaacttactctgtaaccatcccaaactcctcccaggcacagtctggcagaggtcctgccatttcggagacctggaggaagtggcccatttacagccatgtaggcaggcctgcagaccttggcctttactacggtacctgaagtggttcaatgactcagtttcagttacctgagccacagcttaaggtcagttctgcctatatagaaacccacacagttaacctgaggaaatgctctctggtactcactgaaagccacactcatccacatcctgatacaaggcccaccatatgcagacctgactgccaaaacatgccctagtgtctgccgtacagagtgaagtcctgaaggatatttagtctgtccaaaactaaaatgaagatttcaactccccaaccccctctaacaagccagctaaaggtggactatagtgcagacccagcaaccttgtgaccaggctaaaacccctcatcactacaaattcagagggcatctcatcaccctaagggcccaacgaaagatctttaccttctaacatcagtttatgaaaacttgaaaaggtgtttgctccatcaaattcagacaccagtacaaaactatattatgcccattgtctggttctattttaatgtagcactggaagtgtgtggcagaagaattagtcaaagaaataaaaatagccattgaaattgaa

SEQ ID NO: 234 - protein, 620 aa, Homo sapiens
MGPLQFRDVAIEFSLEEWHCLDTAQRNLYRNVMLENYSNLVFLGIVVSKPDLIAHLEQGKKPLTMKRHEMVANPSVICSHFAQDLWPEQNIKDSFQKVILRRYEKRGHGNLQLIKRCESVDECKVHTGGYNGLNQCSTTTQSKVFQCDKYGKVFHKFSNSNRHNIRHTEKKPFKCIECGKAFNQFSTLITHKKIHTGEKPYICEECGKAFKYSSALNTHKRIHTGEKPYKCDKCDKAFIASSTLSKHEIIHTGKKPYKCEECGKAFNQSSTLTKHKKIHTGEKPYKCEECGKAFNQSSTLTKHKKIHTGEKPYVCEECGKAFKYSRILTTHKRIHTGEKPYKCNKCGKAFIASSTLSRHEFIHMGKKHYKCEECGKAFIWSSVLTRHKRVHTGEKPYKCEECGKAFKYSSTLSSHKRSHTGEKPYKCEECGKAFVASSTLSKHEIIHTGKKPYKCEECGKAFNQSSSLTKHKKIHTGEKPYKCEECGKAFNQSSSLTKHKKIHTGEKPYKCEECGKAFNQSSTLIKHKKIHTREKPYKCEECGKAFHLSTHLTTHKILHTGEKPYRCRECGKAFNHSATLSSHKKIHSGEKPYECDKCGKAFISPSSLSRHEIIHTGEKP

SEQ ID NO: 235 - DNA, 4654 bp, Homo sapiens
gtagtcctggcgggcgtgggcccttgaggtgtgctgggagctgtggtccgggtcggcgggcgcgcaagttggctagtctctgcggccacctccggaagggtccgccggctgtgctggtgaggcccagttccaaggctccggcatcctgtgtctcactgagcactgctgcccgatggccatccccaagcactccctgagcccagtgccgtgggaagaggacagcttccttcaagtgaaggtggaggaggaagaggaagccagcctctcccagggcggagaatccagccatgaccacattgctcactctgaggctgcacgcctgcgcttccggcacttccgctatgaggaggcatctggtccacacgaggccctggcccacctccgagcgctgtgctgtcagtggctgcagcccgaggcgcactccaaggagcagatactggagctgctggtgctggagcagttcctgggtgcgctgcccccagagatccaagcctgggtgggagcccagagtcccaagagcggagaggaagccgctgtgctggtggaggatctgactcaggtgctggacaagagaggatgggatccaggagccgagcccacagaggcaagctgcaagcagagtgacctgggagagtcagagccatcaaatgtcactgagaccctcatgggaggtgtttcccttggacccgcctttgtcaaggcatgtgaacctgagggcagctcagagaggtctggactatcaggggagatctggacaaagtctgtcacccaacagatccacttcaagaaaacttcagggccttacaaggatgtccccacagaccagcgtggccgtgaatctggtgcctcgaggaacagttctagtgcgtggccaaacctcacctcccaagagaagcctccttcagaagacaaatttgatctggtggatgcttatgggacagagcctccatacacctactcagggaagaggtcctccaagtgtcgcgagtgtaggaagatgttccagagtgcttcggcgctcgaggcacaccagaagacccattctcggaagaccccatatgcctgcagcgagtgtgggaaagccttcagccggagcactcacctcgcccagcaccaggttgtccacacaggggcgaagccccatgagtgtaaggaatgtgggaaggccttcagccgagtcacccacctgactcagcaccaaaggattcatactggagagaaaccctacaaatgtggggaatgtggtaaaaccttcagccgcagcactcacctcacccagcaccagcgggtgcacacgggggagcggccctacgagtgtgacgcgtgtgggaaagccttcagccagagcacgcacctgactcaacaccagcgcatccacaccggggagaagccctacaagtgtgacgcgtgtggccgagccttcagcgactgctcagccctgatccgacatctgagaatccactctggagagaagccatatcagtgtaaggtttgtccgaaggcctttgcacagagctcctccctcattgagcaccagaggatccacacgggagagaagccttataagtgcagcgactgtgggaaggccttcagtcgtagctcagccctgatggttcacttgcggatccacatcacggtgctgcaatgaccggaagtcgcccctgggggcgtagcacagcgtcttctcggaggctcgaggtctaagagaaacgctgagttcctgaagagccacagacagggtgggtgattgatgagttgtcaaaatgataggtgcctgagggcagactcgggctgtctaggaaccactctgcatttgaggaaccctgatgagcacaaggtgattcaggccagctggagaagcttccagaagggccctgcactgctaccctctatttcccactcagggctgtcccagagagaaggcagccgaactgaggatttagactggttctgagggccagggcaaatgaaggcgcatgtctctcagaactcagcgtcccaagacgctctgggcgggccaactgtagcttgttctcatgtggttcttcttgcctgcttttctgctgcttagcccagaacggacacctgccatgcccacctctgtgccttggcacctactatttccactccagactattttgtgcctaactgcaaggctgacttttgagactgcctcttccacgatgccttttctacactctgcctctctcatggtttcctgtcgtaatcagtggtgctgcttgacacctgcccagcatgttcctgtctctccttttccttccacatcccaccagtcaccagcgctattgttttaacctaaagcttatctgtaattcacctccttttccaccactgctaccttatgtgagccctcattgcctcttgcctggattatagccggggtctccttcctgaccacttcctgcctttattctctgcccctgtatcactctccaggggactcttgatattacttagatctgactgtgtcactccaaggtggaaagctctccaacccatcttctacagcacagcttcctgaacagggtataagtatgctgagatgcaggctgctctgggccccgagcaacctctccagttatcctcatatgcatgtatgaatactgtcatttttctgtgcgtgcagtgaaaatggcctcatctcataccatggctccaccttccatacaccagccacacggaactactgtggtccctgaaggagccatacattttcccacttatgtgcctttgtacctgtgcctggaaccctcctcttctttttctttttcttttcttttctttttttttttttgagatggagtctcgctctgtcgcccaggctggagtgcagtggcgcgatctcggctcactgcaagctctgcctcccgggttcatgccattctcctgcctcagcctcccaagtagctgggactacaggcgcctgccaccacgcccagctagtttttttttttttttgtatttttagtagagatggagtttcaccatgttagccaggatggtctcgatctcctgacctcgtgatccacccgcctcggcctcccaaagtgctgggattacaggcgtgagccaccgcacctggccctcctttttcatctaaggtgtttcaaatgttgcccaaagaaacctccctgctctccgggagcagacttcagcttgccctctctgcttccagagcacctcctagatacctctcttacaactcctgccaccttgttttacttatttgctccttgtagagctgccttttccaaggataccataaactcctgagagcaggggccatgtcttactctcagtatctacaacacacaagactcagtaggccctgactgatgtctcttacatgaatgtgactggtgcccccaggaggcagtcaccgtgctgtctctgccccacattgtccttatgtatgtttacatggatgtctccccagcagcttgaaccctggagagcaagaataatctgattttcctgggggccagcacccaaataagcctggcatgcagtggcctcaataaaatgtgactgtattgagtcattttctagggccccagatcccctggtgtcatggacttagtctttgccagcattctgtccatgtgttctctggtcttctctcacaatgctgcatccctgtcccatttttagggtccctgtctatcactggatgctgcagcttctgttcattactgttagtgtatcattcttcatgcctctgtttctgtgatggtctcatcatatgtgaaccatttgacctggcgtattgtgtactagtcaccgtcaccatctctccatatgtatctccctgtatttcgggcccattccctctatgtcaagagtaaatagaggcacagagactgatgagaaacgttcataacatgaaggtaagactcagggagacagagactttgtggaagtatctctgagggagtcccagacacaggcagagagggccacatatcgtgtgccagaggctgagagactgagagggatgacaggcttaggggaaaactcagagaggagagatgcacattcctagtgaaattgcacaggcttccagcatgctggagggaacagaaaaggcatgggcctgaattcaggctgcagagcctgactcctccctgtggctacttttgggacctaagataagtgactttcctgaacctccatgacctcctcatatgtaaaccagggacaggacccaccttgtgtagtgcctgacccaaagcctggccctgcacactgtctctgactcacagcaatcatcagcacctctctttgcctcctacttgctcagtctctgtcacaagaactggatctccatccccttgatgctctgagcatcttcacccatttggtcgttgagacatatctgtccatgtctgtctaaaaggggaggagatgagggagaaaaaagggaatctactcagagcctgtgtgtgctgcccagtctaccaaataatttatatacatctcagtcctcacacaaccatccctgttttatagaggaggaagtggcttagagaatgtaactgaccaaagtcacactgccaggaactggaagcactaggatttgacagcatatccaaatatgtcagcaatttcaataaacatgactgtactcaacaaa

SEQ ID NO: 236 - protein, 491 aa, Homo sapiens
MAIPKHSLSPVPWEEDSFLQVKVEEEEEASLSQGGESSHDHIAHSEAARLRFRHFRYEEASGPHEALAHLRALCCQWLQPEAHSKEQILELLVLEQFLGALPPEIQAWVGAQSPKSGEEAAVLVEDLTQVLDKRGWDPGAEPTEASCKQSDLGESEPSNVTETLMGGVSLGPAFVKACEPEGSSERSGLSGEIWTKSVTQQIHFKKTSGPYKDVPTDQRGRESGASRNSSSAWPNLTSQEKPPSEDKFDLVDAYGTEPPYTYSGKRSSKCRECRKMFQSASALEAHQKTHSRKTPYACSECGKAFSRSTHLAQHQVVHTGAKPHECKECGKAFSRVTHLTQHQRIHTGEKPYKCGECGKTFSRSTHLTQHQRVHTGERPYECDACGKAFSQSTHLTQHQRIHTGEKPYKCDACGRAFSDCSALIRHLRIHSGEKPYQCKVCPKAFAQSSSLIEHQRIHTGEKPYKCSDCGKAFSRSSALMVHLRIHITVLQ

SEQ ID NO: 237 - DNA, 6055 bp, Homo sapiens
acttccggtttgggagctgtacttgggaggctggagagccggggccggggccggggccggggccggggtcagggtcggaccccgagtgggtgaggctggcccggaggcaaggatgcgagggggttgaggggcagctcgagagggagacgctcccaggggtgggctggagggcgccctcagggcgccttagccgggtcagaggcctctggagggaccgcacgacggctccgggttacccggccggagggagcggagacaaaagaggccagaatcccgcagccgctgctccttgggctgagagctctgcgtccgcgaaccggcagcacctggagcctctggccgacacccgagcccgtcctcaggaagcccgttactactgctcctcggattccgtctctcctgcccaatgtgactctccccaagcccccatggtcctcgctttggagccaaaaccagcttctctccttgcgcgaggttttccgacaggaagaaacacctcttacagtcatctgcaggggattctccaaggacatgggaagatagatgtaagccctggaacccagactcctaagcgaagggaagctgcattctgctattaatgatggccaaatcagctctaagagagaatggcactaactctgagaccttccgacagcgtttcaggagattccattaccaggaggtggctgggccgcgggaggctttcagccaactctgggaactttgctgtcggtggctaaggccggaggtgcgcaccaaggagcagattgtagaactgttggtgctagagcagttcctgaccgtcttacctggggagatccagaattgggtacaggaacaatgtccagaaaatggagaggaggcagtgactctcgtggaagatttagaaagagagcctggaagacctagatcttcggtcacagtctctgtgaaggggcaggaagtgcgcttggagaagatgacacccccgaaatcatcacaagagttattaagtgttcggcaggagtcagtggaaccccagcccaggggtgtacccaagaaagagagggcaagaagcccagacctgggaccacaggagcagatgaacccaaaggagaagctcaaaccttttcaaaggagcggattgccatttcctaaatccggtgtggtctccaggttggagcaaggagagccatggatcccagatctgctgggctctaaggagaaagaacttccaagtggcagccacataggagacagacgagtgcatgctgatctgttaccatccaagaaagatagaagaagctgggtggaacaggatcactggagctttgaagatgagaaggtggcaggtgtgcactggggctatgaagagaccagaacgctcctcgcaattctcagccagactgagttttatgaggctctcagaaactgccataggaacagccaagtgtatggggctgtggctgagcggctcagggaatatggcttcctccggaccctggaacagtgtcggaccaagttcaaaggtctccagaagagctatcggaaagtcaagagcggccacccacctgagacctgccccttctttgaagagatggaagccctgatgagtgctcaggtcattgccctgcccagtaatggcctggaagcagcagcctctcactctggcctggtaggcagcgatgctgagactgaagagccagggcagaggggctggcagcatgaggagggagcagaagaggctgtggctcaggagtctgacagtgatgacatggatctagaggcgaccccccaggaccccaactcagctgcacctgttgtgttcagaagcccaggtggtgtacactggggctatgaagagaccaagacttaccttgcaattcttagtgagacccagttttatgaagccctccggaactgtcaccgcaacagccagctgtatggagcagtggctgagaggttatgggaatatggctttcttaggaccccagaacagtgtcggaccaagtttaaaagcctgcaaaccagctatcggaaagttaagaatggccaggcaccagagacctgtcccttctttgaagagatggatgctttggtgagtgtccgggttgctgccccacccaatgatggccaggaagagactgcttcttgccccgtccaggggaccagtgaggctgaagctcagaagcaagctgaggaagcagacgaggccacagaggaagattctgatgatgatgaagaggatactgagatacccccaggggctgtcataacccgtgctccagtgttattccaaagcccccgtggttttgaagctggatttgagaatgaagataattcaaaacgggatatttctgaggaagtacaactgcataggacattacttgcaagatctgaaaggaaaattccccggtatcttcatcagggtaaaggcaatgagagtgactgtagatcaggaagacagtgggcaaagacctcaggggagaaaagaggaaaactgacactcccggagaagagcttaagtgaagtcctaagtcaacagagaccttgcttgggagagagaccctataaatatctcaaatacagcaaaagctttggtccaaactcccttctcatgcatcaggtatcccaccaggtggaaaatccatataaatgtgctgattgtgggaaaagcttcagtcggagtgcacgactcattagacaccggagaatccacactggagagaaaccttataaatgtcttgactgtggaaaaagtttccgtgacagttcaaatttcatcacccataggagaatccacacaggagagaaaccttatcaatgtggtgagtgtgggaaatgcttcaatcagagctcaagccttatcattcaccagagaacccacacaggagaaaagccctatcaatgtgaagagtgtggaaaaagcttcaataacagttctcattttagtgcacatcggaggatacacacaggagagagaccccatgtgtgtcctgactgtggaaagagtttcagtaagagttctgacttacgtgcacatcatagaacccacacaggagagaaaccctatgggtgtcatgactgtggtaagtgcttcagtaaaagctctgcccttaataagcacggagaaatccatgcacgggaaaagcttctgacacagtcagctcccaagtaagcccctgaggatatataacggaaagaggctcaataaatgtattgtttagaaagtcttccaatagtgagattcatctactattctgtgtccagttagcttaggaaattcactttaggatttatgccactgtttgttccttgtttttcctgatctagactcaaatccccaaggcagtctaaagaatgaaaggaagatttcagtccctctctttgcctgcatctgaattgatggataacatcttttccctctcagtgcctatggtgttcccttaatataagcacagaggacaaggtaatagatcctatgaatttgataagcatccttctttactcattctgtcattcagctgcattttgacaggaaaaacccattacatttcgagaagaagttatgagactttgcccattaggtgggtctagctcttttttttttttttggagacggagttttgctcttgttgcccaggctggagtgcaatggcacgatctcagctcactgcaacctctgcttcccgggttcaagtgattctcctgcctcagcctcccaagtggctggaattacaagcatgcgccaccatgcccagctaattttatatttttagtagagatggggtttctccatgttgggcaggctggtctcaaactcccgacctcaggtgatctgcctgcctcggcctcccaaagtgctgggattacaggcatgagccactgcgccgggcttttttttttcgagatggagtctcactctgtcgtccaggctggagtgcagtggcatgatctcagctcactgcaacctctgccttctgggttcaaacaattttcctgcctcagcctcctgagtagctgggattacagccacctgccaccataccaggctaaattttgcatttttagtagagatggggtttcaccatgttggccaggctggttttgaattgacctcatgatctgcctgcctaggtctcccaaagtgctgggattacaggtgtgagccactgcacccggcccagctcttctttatacaataatggaaatgctaaaatgaatgactcttcctgctcacttaaacctgtgctcaaaatgacatatttgtcaggcaccctcttcatttaccttaaagaaggagagtttaatgtccatcttggttctgccctatgaatcatcttgtcaagaacaggtgttcttatgcagaaacaatgaaaaccttatactgaagtgtgaaccctggatttcttagtttcttctgagtcctagaagaagggttggaatagaataatacatttacaggatttaggttggttttctttctgtccagtctcatctgaatttcgtctgtctcttgtggtccagaagttccacagagcaacgcagctgcatgtggtgacaggtagagcagttaaagctgccaataggaactcgtccatattccacacacctggtatagtgttatgccctccatgggcacttacctgcaataagcagaagccactgccacattcccgtgtattgggaaaatggactactgtgtgcgaacaggccctttaccctaatggcagggaagatggattatctttggccagtggagctgccaatctagacatacacattcaactgaatacaattaaaagcagttctttaaatgcaaatataattactcatctttataatacaatagtattaactgcccatatgctcatagtatgatgagccctgtatagcacaaggtcaacaggtcctctccttgtccttacaatctaaagcagatgacactgacatggacaaacaagtgcacatgcatagttgcggcagttttagagaaatctagaaagctaggtagcaacactatgcataaatgttgtggtccaatgcattagtttgctttaacaaaaatctgggaggtattttttctctttattcaggaaggcttcatgaagcaggaagtggtcaaaggagggaaggttactggttaaattatgataggaagaactttccataactagttgcaaaattgagtgctgggtgggttgaggaatgggaaaaagggggagcaaggtgttttgtgtagatggaacaaagggcaaaggatagactgtaaggaaggccagataaagcttggagtagcatgagaacttgaggaatagtatgatatgggctgtgcagcaggcagagagaatcaccttagctgaaacatgggtgttaggagcagaccatgaggtggtagaaccatcatctatagtaaatcaggtactacgctataactattgataaggaaacagctgactgccactgaaagaataagcagttttaggggactagctcctatgggagataaaggtcagaaatcgtagtatctgatgaagatattttgatgagcaggtgagaagaaagataaacatggccagatggccaaggactgggataagtagccgtttcacattcaattagaattctgtggctggaataagatcagggagagcagtaggaagatatagtattctataattcatagcttgttgtgttagagattaattaggattctgctgttgaatcttagtacaaaaaaatctaatatttattaggaattaagggaagatggtacttctgttatgttgcctaagcagacaggaagctacaagaaacaccagtctgaagcagtgcctcaggatctcagatgatttaggaagtgtgctgtaatgtcaaaaaaaaaaaaaagtattgtctttagtatatctatgtatagtctcgtgggaaaagcattggttgtggtatcaacagatattctggttccagatgtcttgtaagttaacctgcctccatttccctttctgtaaagcaaaataatgtttacacctaatctgtctctcagggataccatattaataaaaatcatgtctataaa

SEQ ID NO: 238 - protein, 852 aa, Homo sapiens
MMAKSALRENGTNSETFRQRFRRFHYQEVAGPREAFSQLWELCCRWLRPEVRTKEQIVELLVLEQFLTVLPGEIQNWVQEQCPENGEEAVTLVEDLEREPGRPRSSVTVSVKGQEVRLEKMTPPKSSQELLSVRQESVEPQPRGVPKKERARSPDLGPQEQMNPKEKLKPFQRSGLPFPKSGVVSRLEQGEPWIPDLLGSKEKELPSGSHIGDRRVHADLLPSKKDRRSWVEQDHWSFEDEKVAGVHWGYEETRTLLAILSQTEFYEALRNCHRNSQVYGAVAERLREYGFLRTLEQCRTKFKGLQKSYRKVKSGHPPETCPFFEEMEALMSAQVIALPSNGLEAAASHSGLVGSDAETEEPGQRGWQHEEGAEEAVAQESDSDDMDLEATPQDPNSAAPVVFRSPGGVHWGYEETKTYLAILSETQFYEALRNCHRNSQLYGAVAERLWEYGFLRTPEQCRTKFKSLQTSYRKVKNGQAPETCPFFEEMDALVSVRVAAPPNDGQEETASCPVQGTSEAEAQKQAEEADEATEEDSDDDEEDTEIPPGAVITRAPVLFQSPRGFEAGFENEDNSKRDISEEVQLHRTLLARSERKIPRYLHQGKGNESDCRSGRQWAKTSGEKRGKLTLPEKSLSEVLSQQRPCLGERPYKYLKYSKSFGPNSLLMHQVSHQVENPYKCADCGKSFSRSARLIRHRRIHTGEKPYKCLDCGKSFRDSSNFITHRRIHTGEKPYQCGECGKCFNQSSSLIIHQRTHTGEKPYQCEECGKSFNNSSHFSAHRRIHTGERPHVCPDCGKSFSKSSDLRAHHRTHTGEKPYGCHDCGKCFSKSSALNKHGEIHAREKLLTQSAPK

SEQ ID NO: 239 - DNA, 1822 bp, Homo sapiens
gttcgcgctccttcccttcccgtggtcgagccgagtcctgacctgagggctgcatcaagatcttgtcattccacatcgtggtttcctttgaggatgtggctgtacccctctcccaggaggagtgggactgtctgatccctgctcagaggggcctctacaaggatgtgatgatggggacctatgggaacctactctcattaggtaagttccctccctggggctcagctcctgggcttcctgctccttaaccttgaggatcaagcttggggctcagaggctcctcaccccctgggcccaaagaccagacattttgaccatggtaccatgcaggtctggtttgcacagagagggggacaggtggtactgggaccctccttgatttttttttttaataggcaatgtctcactctgttgcccatcctggagtgcagtggtgagaccatagctcactgtaaccttgacgtctttggttgaagagatcctcctacctcagcctcccaagtacctgagactacaggcatgggccaccatgcctgtcttattttacttttttagagacagagcctctgtgttgcccaggttggtctcaaactcctagcctcaaggaatcctcccaccttggcctcccatgcctttccaaccctccctgatttatagaaggagaatattattcattgcacacctagtacctccctatcccctgaattaatctttctgcatcttgatgatcggtggtaggatacacagtttataaacgaacctgaggctaacaaatactgtcacttttcttaagtttacacagcctattggtggcagatctgggatatggatctgttcggtttcagagccctgctttcctttcactggaatgtgctcttcgctttagcccttttttttttttttttttggtttctgctagcctttatttgagaaaatttacacaaaaatccccaatgcaacatttacaagtgaatctgtataaatcccatatgcctctttcccaaactgaaaaatggctttatgacaggggtccatgacaatggtataaaaatacttacttaaactgcatcattctcatttatattatacagaccattttggataatatgctcaaaagtggaggaaagcacataacacccctgtttttaaagattatttgctcttgtatcagtcttttgtcaaaggcaaatacttttacttcttggataaaaccaaggtataatatcaattaacttttaaaccaaaagcacaaaatgtcctagttgatagttttggcatgagtaaagggaagggacatgagagaacatcagctcctacaaagcttaagtttagggtcacacttgggaacaaaagcatcaacaaaacaaaatattctcttctcctatcttcttgacattttgtcacatcagaagaacataactaacagagtagctttcattgctcctgaaaaggggaaaggcaccagtcagaaataggaaagaaaatcttgttaggttaatggtacatgatagaatttcacattaaaaagtttaatgatggaggatgggcgtagtggcttacacatgtaatcccagcactttgggaggctgaggtcagtggatcacttgaggtcaggagttcaagaccatcccggccaacacggtgaaactccatctctaccaaaaatacaaaaaccagccaggtgtggtggcatgcacctgcactcccagccactctggaggccgaggcggaagaactacccgaacccaggaggtgaaggttgcagcaagctgagatagcaccattgcacttcagcctgggcatcgcagcaagactctgtccc

SEQ ID NO: 240 - DNA, 4257 bp, Homo sapiens
ggggcccgccgaggcctggcttctgtcctgcgcgcgcagattctcgcaaatctggaagcggatcgcgtggagtgacggtcacaccgcggcgaattaatttccaaagactcatgttacatgagaaagccaccaagaagaccaaagaaaaggagacaaggatggctcttcctcagggatgcttgactttcagggatgtggctatagaattctctttggaggagtggaaatgcctgaaccctgcacagagggctttatacagggccgtgatgttggagaactacaggaacctggagtctgtggatagctctttaaaatccatgacggagttctcatcaacagggcacggtaatacaggagaagtgatccacacagggacattgcaaagacataaaagtcatcacattggagatttttgcttcccagaaatcaagaaagatattcatgactttgagtttcagtggcaagaaattaaaagaaatggccatgaagcacccatgacaaaaatcaaaaagttgactggtagtacagaccgacgtgatcaaaggcatgctggaaacaagcctattaaagatcagcttggatcaagcttttattcacatctgcctgaactgcacgaatttcagactgaagggaaaattgataatcaagtggagaagtctatcaacaatgcttccttggtttcaacatcccaaagaatttcttgtaggctcaaaacccatatttctaataggtatgggaagaactttctccattcttcattattgacacaaatccaggaagaacacatgagagaaaaacctttccaatgtaatgagtgtggcaaagcctttaattatagctcacatttaagaagacatcatgtaacccattcaggagagaaacaatataaatgtgatgtatgtggcaaagtgtttcatcaaaagcaataccttgcatggcaccatagagttcatactggagaaaaaccttacaagtgtaatgagtgttccaagaccttcggtcacaagtcatctcttacacgccatcatagacttcatactggagaaaaaccttacaagtgtaatgagtgtggtaagaccttcagtcagacgtcatcccttgtagggcatcgtagacgtcatactggagagaaaccttacaaatgtgaaggatgtgacaaagtttacagttgcagatcacaacttgaaacacataggcgaattcatactggagagaaaccatacaaatgtaaggtttgtgacaaagcttttaggcataattcatgcctttcacgccataacagagttcatactgaagagaaaccttacacatgtaatgaatgtggcaaggttttccagcgtgattcataccttgcacaacatcagagagttcatactggagagaaaccttacacatgtaatgaatgtggtaaggtttttaatcaaaaagcacaccttgcatgtcattataggcttcatactggagagaaaccttacaagtgtaatgagtgtggcaagaccttcagtcagaagtcatcccttgtgggccatcgtagacttcataccggagaaaaaccttacaactgtcatgagtgtggcaagacctttgctcgaaattcatcccttctaattcataaggcaattcatactggagagaaaccttacaagtgtaatgaatgtggcaaggtttttaatcaacagtcaaaccttgcacaacatcagagagttcatactggagagaaaccttacaggtgtaatgagtgtggcaagaccttcagtcatatgtcatcctttgtataccattatagacttcatagtggagagaaaccttacaagtgcaatgagtgtggcaagaccttcagtcatatgtcatcctttgtatgccatcatagacttcatactggagaaaatccttataagtgcaatgagtgtggcaaagcctttagtgggcagtcatcacttattcatcatcaagcaatccatggtatagggaaactttacaaatgtaatgattctcacaaagtcctcagtaatgctacaagcattgcaaatcattagagaatccataatgaagagagatcttacaagtgtagtaaatgtggcagatatttcagacattgttcatagcttgcagttcatcagtgaactcatactggaaagaaacgttacaaatgtcatgattgcagcaaggtcttcagtcaagcttcatcttatgcaaaacacaggagaattcatatgggagagaacctcacaactgtgataattgtggcagtcatttttttttcttttttcagatgaagtcttactcttttgtccaggctggggtgcagtggcgtgatctcggctcacggcaacctccacctcccaggttcatacgattctccttcctagcctcctgagtagctgggactacaagcatgctccaccaagcctggctaatttttatgtttttagtagagacagggtttcaccatgttggcctggttgctctcaactcttgatcttgtgatccgcctgcctcggcctcccaaagtgctggtattacaggcatgagccaccacgcccagtgtggcaatgtctttactttacattcacaccgcattagacatcagggaatctatactggacagaaatcttacaaatggaataggtgtggcaatgtctttagtctgaggtcactccttgcagaacagtagaaaattcatttttgagataattgtcccaaatacaatgactatagaaaatgacaaactttaattgacattagagtcaattctgcattgactagagtttgagttgacttaacattgagttcaagcattaattgacataaaaagtgtttacgtcaagaagaatgggcagggtgcagttgctcacacctataatcccagcactttgggaggccaaggcaggcagatcacttgaggtcagcagtttgagaccagctgggccaacagacctgaaccagtttgcccagcctgttttttctttccttctttctttcttttcttttctttctttcttttttttttttttttttttgagacagagtctttctcttgtcgcccaagctggcgtgcaatggcacaatcttggttcactgcaacctccacctcctgcattcaagcaattctcttttctaagcctcccaagtagctgggatttcagatgtgtgccaccacaccacatagtccctctccacagagatggttgagaaggctgatggaaaagccagatacttgttctacagctttccctgacactagtatatcatccacatactggagcatagatatacactttgggatgctcatcttttctaacacctcctcaagaatttggccaaacaagttaggagaatctgtaaatccttggggtaagactgtccagcagtattgttgttttcacccagagtgagaatcttcccattcaaaagtgaatatatcctgactatcttcagctaaaggacatgcccagaaggcatctttcaggtctatttctgtaaaccactgatggtcatatggaattttgctgagaatagtatatggattgggaacaacaggatgagtggtttgaacagtttgattaatggcttgaagatcttctacaagtcagtatcaccaatctgactactttacaagtaatattggagtagtatagggagacatgcacagttcaagtagcccatctcagataaggctctcaattagaggttttaaacctaatctaccttctaagggaattggatattggtttcttttcactgtttccctgggagtttttaactttatgtgaattggaggaacttgtagcttccttcaatttccctcccttgaccactcattagcattgatgtagctttcttctgctgtagtaaacaggtttaatgaagtgaagaatccttctgggcttacacgcaagcctatacctaactttgccattaggccacttcctaacaagtttgtcccagccttaggaagtagcaaaaatttaacattggttgatcgggtttcaaatctgacttctgttttttctgagactttggctttaaatccttcccctttgactcctaaaacttgaagttcttctaataaacaatttatattagagggcacaaaacaaacagaggagtgggaagctcctgagtctattagaaaagtaataagttcggctgggtgccatggctcacacctgtagtcccagcactttgggaggccaaggtgggcggatcacctgaggtcgagagttcgagaccagcctgacccacatggagaaaccc

SEQ ID NO: 241 - protein, 641 aa, Homo sapiens
MLHEKATKKTKEKETRMALPQGCLTFRDVAIEFSLEEWKCLNPAQRALYRAVMLENYRNLESVDSSLKSMTEFSSTGHGNTGEVIHTGTLQRHKSHHIGDFCFPEIKKDIHDFEFQWQEIKRNGHEAPMTKIKKLTGSTDRRDQRHAGNKPIKDQLGSSFYSHLPELHEFQTEGKIDNQVEKSINNASLVSTSQRISCRLKTHISNRYGKNFLHSSLLTQIQEEHMREKPFQCNECGKAFNYSSHLRRHHVTHSGEKQYKCDVCGKVFHQKQYLAWHHRVHTGEKPYKCNECSKTFGHKSSLTRHHRLHTGEKPYKCNECGKTFSQTSSLVGHRRRHTGEKPYKCEGCDKVYSCRSQLETHRRIHTGEKPYKCKVCDKAFRHNSCLSRHNRVHTEEKPYTCNECGKVFQRDSYLAQHQRVHTGEKPYTCNECGKVFNQKAHLACHYRLHTGEKPYKCNECGKTFSQKSSLVGHRRLHTGEKPYNCHECGKTFARNSSLLIHKAIHTGEKPYKCNECGKVFNQQSNLAQHQRVHTGEKPYRCNECGKTFSHMSSFVYHYRLHSGEKPYKCNECGKTFSHMSSFVCHHRLHTGENPYKCNECGKAFSGQSSLIHHQAIHGIGKLYKCNDSHKVLSNATSIANH

SEQ ID NO: 242 - DNA, 4227 bp, Homo sapiens
gtcgccggtgcggccgccattgtccggcgttcggcgagtcgggtggtccctttggctggagtgcctctctggtctggggatcacctcaggcgctgtccttcactgggcgatccagcatggaccccgaggacgaaggggtagcgggagtgatgtctgtggggccgccggcggcccggcttcaggtaacaataacaacaataacgacggcggcgggctccgggcaagcgtctcccgcgcagactgaccctttcacctcgcggcgcgatgagagcggcaccgctgttaatgcccttgacacgtggggaaactcagacgcgggtcggggcgtggtgaccgtcctggctggtcagagagggggccgggattccaaccaggcgcctggcccccgaatgcgcatgctccacgcggctctgtcctccccagggctggggtcggtcattcccgagagaatcgagcaggcccatctcctgcgttctgctccgccccgccgacacccttgcccattccaggaaggtctgtcctcgtgttgactgataacagtaattgtagcgttggccgggtgcccagatggcaagaatcatcgaatagagatgctttaacgcgtggagtcagcggacacccaccgggaccccagcaccgcggagcccctgccctggggcttgggcacaacctcttgggggcaatgatgggtcaccacgcactgagtgtgatgagagtgaccaccagggtcgtcccctgcgagactgtgggagaactgcagtgcagggcggtcagtgtttgcagggccatctggccatcagagctccactttctagacaaagtggttgcggcctgtgttctccataaagctgcctcgcgtggcaggaaacaacaataattatccttcctcaagctctgcaactttgaaattatacttttttttattttttgtcgttggtttgttcatggggatttgcattatttcagatttggtacacaaagtgagacttgataatcttaggttgcaggttttcagatgtgtgttgctccaaatttgcatgaaatgctaccacgttttattttgttcttgctgtggatgggggacaaggaatgagtcgtaagaaaggcttgagagaaagtgtattagttacctgttgctgtgtaactcaaaacttcgtgacctggaacaacaataaatatctcacgagttctgacaggagtaatggaatgtcctagctggtggttctggttcaggcccatgaagttacagtgaagatgtcagcatagctgttgtcacctgagacctgagtctggaggatccacctccaggatggctcactcacatgtctgttgataggagacctcagttgttctccatgtaggcctctctttggaactgctagggatccttgcaacatggcatctggcttcccacagaacaagtgatccaggagagggcaaggtagaaactgtaacaccttccatgacctggattcagaattcacactcttgtcacttccacggtgtcttactggttacaaagtcaaccttgttgagtgttggaggggaccacaccagggctggaggtcattggcagaggtggtgggggagcatcttggagactgtccatcacaggagacaaggaccagaatggagagcttcaaggaaccagtgaccttccgggatgtggctgtggactttacccaggaggaatgggggcagctggaccctacccagaggatcctctaccgtgacgtgatgctggagacctttggtcacctgctctccataggtcctgagcttccgaagcctgaagtcatctcccagctggagcaagggaccgagctatgggtggctgagagaggaaccacccagggctgccatccagcctgggagcctcgatctgaaagccaagcatcacgcaaggaagagggcctgcctgaagaggagccatcccatgtcacgggaagggaaggattcccgacagatgctccttatcccaccacgttagggaaagacagggagtgtcagagccagagtctggcactcaaggagcagaataacttgaagcagttggaatttggcctcaaggaagcaccagttcaagatcaaggctacaaaactctcagactcagggaaaactgcgtcctgagttcaagcccaaatccattcccagagatctctagaggggagtatttgtatacttacgactcacagattacagactcagaacataactccagcttagtcagtcagcagacaggctccccaggaaaacagcccggtgaaaacagtgactgtcacagagattccagtcaggccattccaattacggaactcacaaaaagccaggtgcaggacaaaccctacaaatgtactgactgtgggaagtcgtttaaccataacgcacacctcaccgtgcacaagaggattcatacgggagaaagaccttatatgtgcaaggagtgtgggaaagccttcagccagaactcctccctcgtccagcatgagcgcatccacactggagacaagccctacaagtgtgccgaatgtgggaagtctttctgccatagtacacaccttaccgtccatcggaggattcacactggggagaagccctatgagtgtcaggactgtgggagggccttcaaccagaactcctccctggggcggcacaagaggacacacactggggagaagccatacacctgcagtgtgtgtgggaaatccttctctcggaccacttgccttttcctgcacctgagaactcacaccgaggagaggccctacgagtgtaaccactgcgggaagggcttcaggcacagctcatccctggcccagcaccagcggaagcacgcgggggagaagccctttgagtgccgccagaggctgatctttgagcagacgccagctctcacaaagcatgaatggacagaagccctgggctgtgacccacctttgagtcaagatgagaggactcaccgaagcgacagacccttcaaatgtaatcagtgtgggaagtgtttcattcagagctctcacctcatccggcaccagataactcacaccagagaggagcagccccatgggcgaagccggcggcgtgaacaatcctcgagcaggaactcacacctggttcagcatcaacacccgaactccagaaagagctctgcaggcggagcaaaggcagggcagccggaaagcagagccctggctttgtttgacatccaaaaaatcatgcaagagaaaaaccctgtgcacgttattggggtggaagagccttctgtgggtgcttccatgttatttgacatcagagaatccacataggagagaaactttgctgatgacttttaaccacaagtaaaaaatgtgaagcaaccgtgacaagtggtgcccgaccagggacctgaacgaggaaggtctgccagagcagagaaagtgaaactgatcagacgaactacgaacccctggacgggagagtctgccggcggagaatataaggagatggacaaaccgtgtgggtgccctccaggtgtgtgtgaccatggaacgggagaccggagggatccatggtattcaaccgtgggcctgttacctccagtacgagccatgagccagcggaatctgaatgcaaagacagaacaagggccgaccggagtcacaatgacatccaaccccataacatggggacagatcaagaaaacgacacaagaagctgagaaactactggagcgccagggtcaggcaaaaacccctgactccatgttcttggccatgctagctgtagtgtcctgtgcgtctataggatcgggtgaaccaccaaccggcaattgaaagctgcacagcctgaaattacctttattcaattaatgcaaaaacaaaaggggagatgttggaggccgaaggaatgagggtcgtgaccaactcagtataccactggaggctctgtgagcaaacagcaaactgttctcatgaaagcaggatgttggcgaactgacaaactctgtctgccgccagaaggaatgctgggggcagtcatgtcccaggtcccgtgctccttgaggttatccacaggaacatccagaacctgttgaacaaagaaaggaatcatgtgggcctgtgttaaatcaaatagctgaccgacagttatcccttcctccctattcactctacctaataaatatgaagggctgtaaaagctcaggtccctgttccctaatatcaaggagccccctgaccccttctttc

SEQ ID NO: 243 - DNA, 21 bp, Unknown
  artificial sequence
gcagcatattggagagaaatt

SEQ ID NO: 244 - DNA, 21 bp, Unknown
  artificial sequence
agtcgaaagagcagccttatt

1. An agent modulating the expression and/or activity of one or more i) KRAB-containing zinc finger protein (KZFP), ii) mRNA encoding a KZFP, and/or iii) KZFP gene, for use in the treatment and/or prevention of cancer and/or cancer metastasis in a subject in need thereof, wherein said one or more KZFP is selected from the group comprising those listed in Table 1, or a combination of one or more thereof.

2. The agent for use of claim 1, wherein said agent inhibits the translation of one or more RNA encoding a KZFP.

3. The agent for use of claim 1, wherein the agent inhibits the transcription of one or more KZFP gene encoding a KZFP.

4. The agent for use of claim 1, wherein the agent modulates the activity of one or more KZFP protein by enhancing and/or favoring the degradation of said one or more KZFP, by preventing the recognition of its targets or by any other mean resulting in a loss of function.

5. The agent for use of any one of the preceding claims, wherein the agent is selected from the group comprising a nucleic acid, a chemical compound, a peptide or analog thereof, an antibody or an antigen-binding fragment thereof, and an antibody mimetic, or a combination of one or more thereof.

6. The agent for use of claim 5, wherein the nucleic acid is selected from the group comprising a nucleic acid encoding an siRNA, an miRNA, a piRNA, an hnRNA, an snRNA, an sg RNA, a CRISPR-based loss-of-function system, an esiRNA, an shRNA, and an antisense oligonucleotide, or a combination of one or more thereof.

7. The agent for use of any one of the preceding claims, wherein the cancer is selected from a hematological cancer (such as e.g. a Non-Hodgkin lymphoma (NHL) or a leukemia), and a solid cancer (such as e.g. a colon cancer).

8. The agent for use of any one of the preceding claims, wherein
the one or more mRNA encoding a KZFP is selected from the group comprising, or represented by, cDNA sequences SEQ ID No. 11, SEQ ID No. 13, SEQ ID No. 63, SEQ ID No. 81, SEQ ID No. 129, SEQ ID No. 155, SEQ ID No. 181, SEQ ID No. 203, SEQ ID No. 209, and SEQ ID No. 231, a fragment or a variant thereof or a combination of one or more thereof and/or wherein,
the one or more KZF protein is selected from the group comprising, or consisting of, SEQ ID No. 12, SEQ ID No. 14, SEQ ID No. 64, SEQ ID No. 82, SEQ ID No. 130, SEQ ID No. 156, SEQ ID No. 182, SEQ ID No. 204, SEQ ID No. 210, and SEQ ID No. 232, a fragment or a variant thereof or a combination of one or more thereof.

9. A plasmid or a vector comprising one or more nucleic acid(s) encoding the siRNA, miRNA, piRNA, hnRNA, snRNA, sg RNA, CRISPR-based loss-of-function system, esiRNA, shRNA, and antisense oligonucleotide, or combination of one or more thereof, of claim 6.

10. A host cell comprising, or modified by the introduction of,
i) a plasmid or vector of claim 9, or
ii) one or more nucleic acid(s) encoding the siRNA, miRNA, piRNA, hnRNA, snRNA, sg RNA, CRISPR-based loss-of-function system, esiRNA, shRNA, and antisense oligonucleotide, or combination of one or more thereof, of claim 6.

11. A pharmaceutical composition comprising
i) a therapeutically effective amount of an agent modulating the expression and/or activity of one or more i) KZFP, ii) mRNA encoding a KZFP and/or iii) KZFP gene, of anyone of claims 1 to 8, or
ii) a plasmid or a vector of claim 9, or
iii) a host cell of claim 10,
and a pharmaceutically acceptable carrier or diluent.

12. The pharmaceutical composition of claim 11, for use in the treatment and/or prevention of cancer and/or cancer metastasis in a subject in need thereof.

13. The pharmaceutical composition of claim 9 or 10, further comprising one or more additional anticancer agent or therapy.

14. The pharmaceutical composition of any one of claims 11 to 13, wherein said KZFP is selected from the group comprising ZNF671, ZNF776, ZNF586, ZNF552, ZNF587B, ZNF417, ZNF107, ZNF121, ZNF200, ZNF239, ZNF473, ZNF547, ZNF558, ZNF587, ZNF695, ZNF7, ZNF700, ZNF749, ZNF766, ZNF783, ZNF789, ZNF814, ZNF841, and ZNF850, or a combination of one or more thereof.

15. The pharmaceutical composition of any one of claims 11 to 14, wherein the cancer is selected from a hematological cancer (such as e.g. a Non-Hodgkin lymphoma (NHL) or a leukemia), and a solid cancer (such as e.g. a colon cancer).

16. The pharmaceutical composition of any one of claims 13 to 15, wherein the additional anticancer agent or therapy is selected from the group comprising radiotherapy, chemotherapy, immunotherapy, inhibitors of DNA methylation, targeted therapy and hormone therapy, or a combination of one of more thereof.

17. A method of diagnosing cancer and/or cancer metastasis in a subject comprising:
(a) detecting, directly or indirectly, and measuring the level of transcription and/or expression and/or activity of one or more KZFP in a sample obtained from said subject;
(b) comparing the level of transcription and/or expression and/or activity of said one or more KZFP to a control biological sample for the same one or more KZFP;
wherein a differential transcription and/or expression and/or activity of one or more one or more KZFP in said biological sample, relative to the level of corresponding said one or more KZFP in a control biological sample of a cancer-free subject, is indicative of the subject having cancer and/or cancer metastasis.

18. The method of claim 17, wherein the differential transcription and/or expression and/or activity level of one or more one or more KZFP corresponds to an upregulated expression of said one or more KZFP.

19. The method of claim 18, wherein the upregulated transcription and/or expression and/or activity of said one or more KZFP in a biological sample corresponds to an increase equal or superior to about 5%, preferably equal or superior to about 20%, more preferably equal or superior to about 40%, most preferably equal or superior to about 60%, more preferably equal or superior to about 500%, even more preferably equal or superior to about 1000%, in particular equal or superior to about 5000% when compared to the level of corresponding said one or more KZFP in a control biological sample of a cancer-free subject.

20. The method of any one of claims 17-19, wherein the biological sample is selected from the group comprising whole blood, serum, plasma, semen, saliva, tears, urine, fecal material, sweat, buccal smears, skin, and cancer cells or a combination of one or more of these biological samples.

21. The method of any one of claims 17-20, wherein the KZFP is selected from the group comprising ZNF671, ZNF776, ZNF586, ZNF552, ZNF587B, ZNF417, ZNF107, ZNF121, ZNF200, ZNF239, ZNF473, ZNF547, ZNF558, ZNF587, ZNF695, ZNF7, ZNF700, ZNF749, ZNF766, ZNF783, ZNF789, ZNF814, ZNF841, and ZNF850, or a combination of one or more thereof.

22. The method of claim 21, wherein the KZFP is selected from the group comprising ZNF121, ZNF200, ZNF473, ZNF547, ZNF587, ZNF7, ZNF749, ZNF766, ZNF814, and ZNF850, or a combination of one or more thereof.

23. The method of any one of claims 17-22, wherein the cancer is selected from a hematological cancer (such as e.g. a Non-Hodgkin lymphoma (NHL) or a leukemia), and a solid cancer (such as e.g. a colon cancer).

24. The method of any one of claims 17-22, further comprising administering an agent modulating the expression and/or activity of one or more i) KRAB-containing zinc finger protein (KZFP), ii) mRNA encoding a KZFP, and/or iii) KZFP gene, of anyone of claims 1 to 8.

25. The method of any one of claims 17-22, further comprising administering a pharmaceutical composition comprising
i) a therapeutically effective amount of an agent modulating the expression and/or activity of one or more i) KZFP, ii) mRNA encoding a KZFP and/or iii) KZFP gene, of anyone of claims 1 to 8, or
ii) a plasmid or a vector of claim 9, or
iii) a host cell of claim 10,
and a pharmaceutically acceptable carrier or diluent.

26. A method of determining the progression or regression of a cancer in a subject suffering therefrom and under cancer treatment, said method comprising:
(a) detecting, directly or indirectly, and measuring the level of transcription and/or expression and/or activity of one or more KZFP in a sample obtained from said subject;
(b) periodically comparing the level of transcription and/or expression and/or activity of said one or more KZFP,
wherein an alteration in the level of transcription and/or expression and/or activity of one or more KZFP in a sample obtained from the same subject, relative to the level of transcription and/or expression and/or activity of one or more KZFP, determined previously, is indicative of the progression or regression of said cancer.

27. The method of claim 26, wherein the alteration in the transcription and/or expression and/or activity level(s) of one or more KZFP corresponds to an enhanced transcription and/or expression and/or activity of said one or more KZFP and is indicative of the progression of said cancer.

28. The method of claim 26 or 27, wherein the alteration in the transcription and/or expression and/or activity level(s) of one or more one or more KZFP corresponds to a decreased transcription and/or expression and/or activity of said one or more KZFP and is indicative of the regression of said cancer.

29. The method of any one of claims 26 to 28, wherein the KZFP is selected from the group comprising ZNF671, ZNF776, ZNF586, ZNF552, ZNF587B, ZNF417, ZNF107, ZNF121, ZNF200, ZNF239, ZNF473, ZNF547, ZNF558, ZNF587, ZNF695, ZNF7, ZNF700, ZNF749, ZNF766, ZNF783, ZNF789, ZNF814, ZNF841, and ZNF850, or a combination of one or more thereof, preferably selected from the group comprising ZNF121, ZNF200, ZNF473, ZNF547, ZNF587, ZNF7, ZNF749, ZNF766, ZNF814, and ZNF850, or a combination of one or more thereof.

30. The method of any one of claims 26 to 29, wherein the cancer is selected from a hematological cancer (such as e.g. a Non-Hodgkin lymphoma (NHL) or a leukemia), and a solid cancer (such as e.g. a colon cancer).

31. The method of any one of claims 26 to 30, further comprising a step of continuing the treatment, adapting the treatment, changing the treatment, or changing the dosage of the treatment.

32. The method of claim 31, wherein the step of changing the treatment comprises i) administering an agent modulating the expression and/or activity of one or more i) KRAB-containing zinc finger protein (KZFP), ii) mRNA encoding a KZFP, and/or iii) KZFP gene, of anyone of claims 1 to 8.

33. A method of treatment of cancer, and/or cancer metastasis comprising administering an agent modulating the expression and/or activity of one or more i) KRAB-containing zinc finger protein (KZFP), ii) mRNA encoding a KZFP, and/or iii) KZFP gene, of anyone of claims 1 to 8 to a subject in need thereof.

34. The method of claim 33, wherein the KZFP is selected from the group comprising ZNF671, ZNF776, ZNF586, ZNF552, ZNF587B, ZNF417, ZNF107, ZNF121, ZNF200, ZNF239, ZNF473, ZNF547, ZNF558, ZNF587, ZNF695, ZNF7, ZNF700, ZNF749, ZNF766, ZNF783, ZNF789, ZNF814, ZNF841, and ZNF850, or a combination of one or more thereof.

35. The method of treatment of claim 33 or 34, wherein said agent is in the form of a pharmaceutical composition according to any of claims 11 to 16.

36. A kit comprising
(a) one or more agents according to any one of claims 1 to 8, plasmid or vector of claim 9, host cell of claim 10 and/or a pharmaceutical composition of any one of claims 11 to 16, and
(b) instructions for use.

37. A method of stratifying a cancer in a subject comprising:
(a) detecting, directly or indirectly, and measuring the level of transcription and/or expression and/or activity of one or more KZFP in a sample obtained from said subject;
(b) comparing the level of transcription and/or expression and/or activity of said one or more KZFP to a control biological sample for the same one or more KZFP;
wherein an alteration in the transcription and/or expression and/or activity level of one or more one or more KZFP in said biological sample, relative to the level of corresponding said one or more KZFP in a control biological sample of a cancer-free subject, is indicative of the disease stage or grade.

38. The method of claim 37, wherein the KZFP is selected from the group comprising ZNF671, ZNF776, ZNF586, ZNF552, ZNF587B, ZNF417, ZNF107, ZNF121, ZNF200, ZNF239, ZNF473, ZNF547, ZNF558, ZNF587, ZNF695, ZNF7, ZNF700, ZNF749, ZNF766, ZNF783, ZNF789, ZNF814, ZNF841, and ZNF850, or a combination of one or more thereof.

39. The pharmaceutical agent of any one of claims 11 to 16, the methods of any one of claims 17 to 35 36 to 38, wherein
the transcript or mRNA encoding a KZFP is selected from the group comprising, or represented by, cDNA sequences: SEQ ID No. 1, SEQ ID No. 3, SEQ ID No. 5, SEQ ID No. 7, SEQ ID No. 9, SEQ ID No. 11, SEQ ID No. 13, and SEQ ID No. 15, a fragment or a variant thereof or a combination of one or more thereof and/or wherein,
the KZF protein is selected from the group comprising, or consisting of, SEQ ID No. 2, SEQ ID No. 4, SEQ ID No. 6, SEQ ID No. 8, SEQ ID No. 10, SEQ ID No. 12, SEQ ID No. 14, and SEQ ID No. 16, a fragment or a variant thereof or a combination of one or more thereof.

40. A method for classifying a cancer subject, the method comprising
(a) detecting, directly or indirectly, and measuring the level of transcription and/or expression and/or activity of one or more KZFP in a biological sample obtained from said subject,
wherein said one or more KZFP is selected from the group listed in Table 1 or a variant or fragment thereof, and
(b) classifying the cancer subject as having a poor prognosis based on the presence and/or alteration of the transcription and/or expression and/or activity level(s) of the one or more KZFP in the biological sample.

41. The method of claim 40, wherein the cancer subject is determined as having a poor prognosis when the transcription and/or expression and/or activity level(s) of one or more KZFP, variant or fragment thereof of Table 1 is upregulated.

42. The method of claim 40 or 41, wherein the cancer subject is determined as having a poor prognosis when an alteration of the transcription and/or expression and/or activity level(s) of one or more KZFP, variant or fragment thereof, selected from the group comprising ZNF671, ZNF776, ZNF586, ZNF552, ZNF587B, ZNF417, ZNF107, ZNF121, ZNF200, ZNF239, ZNF473, ZNF547, ZNF558, ZNF587, ZNF695, ZNF7, ZNF700, ZNF749, ZNF766, ZNF783, ZNF789, ZNF814, ZNF841, and ZNF850, is detected and/or measured.

43. The method of any one of claims 40 to 42, wherein the cancer subject is determined as having a poor prognosis when an alteration of the transcription and/or expression and/or activity level(s) of one or more KZFP, variant or fragment thereof, selected from the group comprising ZNF107, ZNF121, ZNF200, ZNF239, ZNF473, ZNF547, ZNF558, ZNF587, ZNF695, ZNF7, ZNF700, ZNF749, ZNF766, ZNF783, ZNF789, ZNF814, ZNF841, ZNF8-ERVK3-1 and ZNF850 is detected and/or measured.

44. The method of any of claims 40 to 43, wherein the cancer subject is determined as having a poor prognosis when an alteration of the transcription and/or expression and/or activity level(s) of one or more KZFP, variant or fragment thereof, selected from the group comprising ZNF121, ZNF200, ZNF473, ZNF547, ZNF587, ZNF7, ZNF749, ZNF766, ZNF814, and ZNF850 is detected and/or measured.

45. The method of any of claim 40, wherein the cancer subject is suffering from lymphoma and is determined as having a poor prognosis when the transcription and/or expression and/or activity level(s) of one or more KZFP selected from the group comprising ZNF200, ZNF671, ZNF586, ZNF343, ZNF473, ZNF614, ZNF7, ZNF547, ZNF773, ZNF776, ZKSCAN2, ZNF761, ZNF577, ZNF160, ZNF584, ZNF417, ZNF543, ZNF713, ZNF552, ZFP82, ZNF320, ZNF749, ZNF17, ZNF567, ZNF766, ZNF765, ZNF252P, ZNF420, ZNF615, ZNF121, ZNF544, ZNF583, ZNF587, ZNF814, ZNF805, ZNF134, ZNF850, and ZNF587B, variant or fragment thereof, is upregulated.

46. The method of any of claims 40 to 45, wherein the cancer subject is suffering from lymphoma and is determined as having a poor prognosis when the transcription and/or expression and/or activity level(s) of one or more KZFP selected from the group comprising ZNF121, ZNF200, ZNF473, ZNF547, ZNF587, ZNF7, ZNF749, ZNF766, ZNF814, and ZNF850, variant or fragment thereof, is upregulated.

47. The method of any of claims 40 to 46, wherein the lymphoma is aggressive non-Hodgkin lymphoma (NHL).

48. One or more oligonucleotide probes or primers specific to one or more target sequences within an mRNA encoding a KZFP, or a combination of KZFP, selected from any of SEQ ID Nos of Table 1.
